(19) United States
(12) Patent Application Publication
(10) Pub. No.: US 2003/0157082 A1
(43) Pub. Date: Aug. 21, 2003

(54) Methods and compositions for treating cancer using 140, 1470, 1686, 2089, 2427, 3702, 5891, 6428, 7181, 7660, 25641, 69583, 49863, 8897, 1682, 17667, 9235, 3703, 14171, 10359, 1660, 1450, 18894, 2088, 32427, 2160, 9252, 9389, 1642, 85269, 10297, 1584, 9525, 14124, 4469, 8990, 2100, 9288, 64698, 10480,20893, 33230,1586, 9943, 16334, 68862, 9011, 14031, 6178, 21225, 1420, 32236, 2099, 2150, 26583, 2784, 8941, 9811, 27444, 50566 or 66428 molecules

(75) Inventors: John Joseph Hunter, Somerville, MA (US); Kyle J. MacBeth, Boston, MA (US); Fong-Ying Tsai, Newton, MA (US); Andrea Lesoon, Concord, MA (US); Eric S. Lightcap, Natick, MA (US); Mark J. Williamson, Saugus, MA (US); Laura A. Rudolph-Owen, Medford, MA (US)

Correspondence Address: Paul J. Paglierani, Millennium Pharmaceuticals, Inc., 75 Sidney Street, Cambridge, MA, 02139, US

(73) Assignee: Millennium Pharmaceuticals, Inc.

(21) Appl. No.: 10/354,358

(22) Filed: Jan. 30, 2003

Related U.S. Application Data
(60) Provisional application No. 60/353,600, filed on Jan. 31, 2002.
(60) Provisional application No. 60/364,517, filed on Mar. 15, 2002.
(60) Provisional application No. 60/371,075, filed on Apr. 9, 2002.
(60) Provisional application No. 60/371,507, filed on Apr. 10, 2002.
(60) Provisional application No. 60/372,984, filed on Apr. 16, 2002.
(60) Provisional application No. 60/374,194, filed on Apr. 19, 2002.
(60) Provisional application No. 60/382,995, filed on May 24, 2002.
(60) Provisional application No. 60/385,023, filed on May 31, 2002.
(60) Provisional application No. 60/388,853, filed on Jun. 14, 2002.
(60) Provisional application No. 60/389,395, filed on Jun. 17, 2002.
(60) Provisional application No. 60/391,324, filed on Jun. 25, 2002.
(60) Provisional application No. 60/395,944, filed on Jul. 15, 2002.
(60) Provisional application No. 60/397,726, filed on Jul. 22, 2002.
(60) Provisional application No. 60/403,046, filed on Aug. 13, 2002.
(60) Provisional application No. 60/405,155, filed on Aug. 22, 2002.
(60) Provisional application No. 60/406,361, filed on Aug. 27, 2002.
(60) Provisional application No. 60/421,195, filed on Oct. 25, 2002.
(60) Provisional application No. 60/425,456, filed on Nov. 12, 2002.
(60) Provisional application No. 60/427,626, filed on Nov. 19, 2002.
(60) Provisional application No. 60/432,122, filed on Dec. 10, 2002.

(51) Int. Cl. C12Q 1/68; A61K 48/00; A61K 38/43

(52) U.S. Cl. 424/94.1; 514/44; 435/6

(57) ABSTRACT

The present invention relates to methods for the diagnosis and treatment of a cancer or cancer. Specifically, the present invention identifies the differential expression of 140, 1470, 1686, 2089, 2427, 3702, 5891, 6428, 7181, 7660, 25641, 69583, 49863, 8897, 1682, 17667, 9235, 3703, 14171, 10359, 1660, 1450, 18894, 2088, 32427, 2160, 9252, 9389, 1642, 85269, 10297, 1584, 9525, 14124, 4469, 8990, 2100, 9288, 64698, 10480, 20893, 33230, 1586, 9943, 16334, 68862, 9011, 14031, 6178, 21225, 1420, 32236, 2099, 2150, 26583, 2784, 8941, 9811, 27444, 50566 and 66428 genes in tissues relating to cancer, relative to their expression in normal, or non-cancer disease states, and/or in response to manipulations relevant to a cancer. The present invention describes methods for the diagnostic evaluation and prognosis of various cancers, and for the identification of subjects exhibiting a predisposition to such conditions. The invention also provides methods for identifying a compound capable of modulating a cancer or cancer. The present invention also provides methods for the identification and therapeutic use of compounds as treatments of cancer.

### RELATED APPLICATIONS

[0001] The present application claims the benefit of U.S. Provisional Application serial No. 60/353,600, filed on Jan. 31, 2002, of U.S. Provisional Application serial No. 60/364,517, filed on Mar. 15, 2002, of U.S. Provisional Application serial No. 60/371,075, filed on Apr. 9, 2002, of U.S. Provisional Application serial No. 60/371,507, filed on Apr. 10, 2002, of U.S. Provisional Application serial No. 60/372,984, filed on Apr. 16, 2002, of U.S. Provisional Application serial No. 60/374,194, filed on Apr. 19, 2002, of U.S. Provisional Application serial No. 60/382,995, filed on May 24, 2002, of U.S. Provisional Application serial No. 60/385,023, filed on May 31, 2002, of U.S. Provisional Application serial No. 60/388,853, filed on Jun. 14, 2002, of U.S. Provisional Application serial No. 60/389,395, filed on Jun. 17, 2002, of U.S. Provisional Application serial No. 60/391,324, filed on Jun. 25, 2002, of U.S. Provisional Application serial No. 60/395,944, filed on Jul. 15, 2002, of U.S. Provisional Application serial No. 60/397,726, filed on Jul. 22, 2002, of U.S. Provisional Application serial No. 60/403,046, filed on Aug. 13, 2002, of U.S. Provisional Application serial No. 60/405,155, filed on Aug. 22, 2002, of U.S. Provisional Application serial No. 60/406,361, filed on Aug. 27, 2002, of U.S. Provisional Application serial No. 60/421,195, filed on Oct. 25, 2002, of U.S. Provisional Application serial No. 60/425,456, filed on Nov. 12, 2002, of U.S. Provisional Application serial No. 60/427,626, filed on Nov. 19, 2002, and of U.S. Provisional Application serial No. 60/432,122, filed on Dec. 10, 2002. The entire contents of these provisional patent applications are hereby incorporated by this reference.

### BACKGROUND OF THE INVENTION

[0002] Cancers can be viewed as a breakdown in the communication between tumor cells and their environment, including their normal neighboring cells. Growth-stimulatory and growth-inhibitory signals are routinely exchanged between cells within a tissue. Normally, cells do not divide in the absence of stimulatory signals or in the presence of inhibitory signals. In a cancerous or neoplastic state, a cell acquires the ability to “override” these signals and to proliferate under conditions in which a normal cell would not.

[0003] In general, tumor cells must acquire a number of distinct aberrant traits in order to proliferate in an abnormal manner. Reflecting this requirement is the fact that the genomes of certain well-studied tumors carry several different independently altered genes, including activated oncogenes and inactivated tumor suppressor genes. In addition to abnormal cell proliferation, cells must acquire several other traits for tumor progression to occur. For example, early on in tumor progression, cells must evade the host immune system. Further, as tumor mass increases, the tumor must acquire vasculature (e.g. through neo-angiogenesis) to supply nourishment and remove metabolic waste. Additionally, cells must acquire an ability to invade adjacent tissue. In many cases cells ultimately acquire the capacity to metastasize to distant sites.

[0004] Angiogenesis is a fundamental process by which new blood vessels are formed, as reviewed, for example, by Folkman and Shing, J. Biol. Chem. 267:10931-10934 (1992). Capillary blood vessels consist of endothelial cells and pericytes. These two cell types carry all of the genetic information to form tubes, branches and whole capillary networks. Specific angiogenic molecules and growth factors can initiate this process. Specific inhibitory molecules can stop it. These molecules with opposing function appear to be continuously acting in concert to maintain a stable microvasculature in which endothelial cell turnover is thousands of days. However, the same endothelial cells can undergo rapid proliferation, i.e. less than five days, during burst of angiogenesis, for example, during wound healing.

[0005] Key components of the angiogenic process are the degradation of the basement membrane, the migration and proliferation of capillary endothelial cell (EC) and the formation of three dimensional capillary tubes. The normal vascular turnover is rather low: the doubling time for capillary endothelium is from 50-20,000 days, but it is 2-13 days for tumor capillary endothelium. The current understanding of the sequence of events leading to angiogenesis is that a cytokine capable of stimulating endothelial cell proliferation, such as fibroblast growth factor (FGF), causes release of collagenase or plasminogen activator which, in turn, degrade the basement membrane of the parent venule to facilitate the migration of the endothelial cells. These capillary cells, having sprouted from the parent vessel, proliferate in response to growth factors and angiogenic agents in the surrounding environment to form lumen and eventually new blood vessels.

[0006] The development of a vascular blood supply is essential in reproduction, development and wound repair (Folkman, et al., Science 43:1490-1493 (1989)). Under these conditions, angiogenesis is highly regulated, so that it is turned on only as necessary, usually for brief periods of days, then completely inhibited. However, a number of serious diseases are also dominated by persistent unregulated angiogenesis and/or abnormal neovascularization including solid tumor growth and metastasis, psoriasis, endometriosis, Grave's disease, ischemic disease (e.g., atherosclerosis), and chronic inflammatory diseases (e.g., rheumatoid arthritis), and some types of eye disorders, (reviewed by Auerbach, et al., J. Microvasc. Res. 29:401-411 (1985); Folkman, Advances in Cancer Research, eds. Klein and Weinhouse, pp. 175-203 (Academic Press, New York, 1985); Patz, Am. J. Opthalmol. 94:715-743 (1982); and Folkman, et al., Science 221:719-725 (1983)). For example, there are a number of eye diseases, many of which lead to blindness, in which ocular neovascularization occurs in response to the diseased state. These ocular disorders include diabetic retinopathy, macular degeneration, neovascular glaucoma, inflammatory diseases and ocular tumors (e.g., retinoblastoma). There are a number of other eye diseases which are also associated with neovascularization, including retrolental fibroplasia, uveitis, eye diseases associated with choroidal neovascularization and eye diseases which are associated with iris neovascularization.

[0007] It is apparent that the complex process of tumor development and growth must involve multiple gene products. It is therefore important to define the role of specific genes involved in tumor development and growth and identify those genes and gene products that can serve as targets for the diagnosis, prevention and treatment of cancers.

[0008] In the realm of cancer therapy it often happens that a therapeutic agent that is initially effective for a given patient becomes, overtime, ineffective or less effective for that patient. The very same therapeutic agent may continue to be effective over a long period of time for a different patient. Further, a therapeutic agent that is effective, at least initially, for some patients can be completely ineffective or even harmful for other patients. Accordingly, it would be useful to identify genes and/or gene products that represent prognostic markers with respect to a given therapeutic agent or class of therapeutic agents. It then may be possible to determine which patients will benefit from particular therapeutic regimen and, importantly, determine when, if ever, the therapeutic regime begins to lose its effectiveness for a given patient. The ability to make such predictions would make it possible to discontinue a therapeutic regime that has lost its effectiveness well before its loss of effectiveness becomes apparent by conventional measures

### DESCRIPTION OF THE INVENTION

[0009] The present invention provides methods and compositions for the diagnosis and treatment of cancer, including but not limited to cancers of the lung, ovary, prostate, breast or colon, or conditions characterized by an increase or decrease in angiogenesis. The polypeptides and nucleic acids of the invention can also be used to treat, prevent, and/or diagnose cancers and neoplastic conditions in addition to the ones described above. As used herein, the terms “cancer”, “hyperproliferative” and “neoplastic” refer to cells having the capacity for autonomous growth, i.e., an abnormal state or condition characterized by rapidly proliferating cell growth. Hyperproliferative and neoplastic disease states may be categorized as pathologic, i.e., characterizing or constituting a disease state, or may be categorized as non-pathologic, i.e., a deviation from normal but not associated with a disease state. The term is meant to include all types of cancerous growths or oncogenic processes, metastatic tissues or malignantly transformed cells, tissues, or organs, irrespective of histopathologic type or stage of invasiveness. “Pathologic hyperproliferative” cells occur in disease states characterized by malignant tumor growth. Examples of non-pathologic hyperproliferative cells include proliferation of cells associated with wound repair.

[0010] Examples of cellular proliferative and/or differentiative disorders include cancer, e.g., carcinoma, sarcoma, or metastatic disorders. The molecules of the present invention can act as novel diagnostic targets and therapeutic agents for controlling breast cancer, ovarian cancer, colon cancer, lung cancer, prostatic cancer, squamous carcinoma of the cervix, as well as metastasis of such cancers and the like. A metastatic tumor can arise from a multitude of primary tumor types, including but not limited to those of breast, lung, liver, colon, ovarian origin, and colom-liver. A cellular proliferative disorder can be an endothelial cell disorder. As used herein, an “endothelial cell disorder” includes a disorder characterized by aberrant, unregulated, or unwanted endothelial cell activity, e.g., proliferation, migration, angiogenesis, or vascularization; or aberrant expression of cell surface adhesion molecules or genes associated with angiogenesis, e.g., TIE-2, FLT and FLK. Endothelial cell disorders include tumorigenesis, tumor metastasis, psoriasis, diabetic retinopathy, endometriosis, Grave's disease, ischemic disease (e.g., atherosclerosis), and chronic inflammatory diseases (e.g., rheumatoid arthritis).

[0011] Examples of cancers or neoplastic conditions, in addition to the ones described above, include, but are not limited to, a fibrosarcoma, myosarcoma, liposarcoma, chondrosarcoma, osteogenic sarcoma, chordoma, angiosarcoma, endotheliosarcoma, lymphangiosarcoma, lymphangioendotheliosarcoma, synovioma, mesothelioma, Ewing's tumor, leiomyosarcoma, rhabdomyosarcoma, gastric cancer, esophageal cancer, rectal cancer, pancreatic cancer, ovarian cancer, prostate cancer, uterine cancer, cancer of the head and neck, skin cancer, brain cancer, squamous cell carcinoma, sebaceous gland carcinoma, papillary carcinoma, papillary adenocarcinoma, cystadenocarcinoma, medullary carcinoma, bronchogenic carcinoma, renal cell carcinoma, hepatoma, bile duct carcinoma, choriocarcinoma, seminoma, embryonal carcinoma, Wilm's tumor, cervical cancer, testicular cancer, small cell lung carcinoma, non-small cell lung carcinoma, bladder carcinoma, epithelial carcinoma, glioma, astrocytoma, medulloblastoma, craniopharyngioma, ependymoma, pinealoma, hemangioblastoma, acoustic neuroma, oligodendroglioma, meningioma, melanoma, neuroblastoma, retinoblastoma, leukemia, lymphoma, or Kaposi sarcoma.

[0012] Examples of cellular proliferative and/or differentiative disorders of the breast include, but are not limited to, proliferative breast disease including, e.g., epithelial hyperplasia, sclerosing adenosis, and small duct papillomas; tumors, e.g., stromal tumors such as fibroadenoma, phyllodes tumor, and sarcomas, and epithelial tumors such as large duct papilloma; carcinoma of the breast including in situ (noninvasive) carcinoma that includes ductal carcinoma in situ (including Paget's disease) and lobular carcinoma in situ, and invasive (infiltrating) carcinoma including, but not limited to, invasive ductal carcinoma, invasive lobular carcinoma, medullary carcinoma, colloid (mucinous) carcinoma, tubular carcinoma, and invasive papillary carcinoma, and miscellaneous malignant neoplasms. Disorders in the male breast include, but are not limited to, gynecomastia and carcinoma.

[0013] Examples of cellular proliferative and/or differentiative disorders of the lung include, but are not limited to, bronchogenic carcinoma, including paraneoplastic syndromes, bronchioloalveolar carcinoma, neuroendocrine tumors, such as bronchial carcinoid, miscellaneous tumors, and metastatic tumors; pathologies of the pleura, including inflammatory pleural effusions, noninflammatory pleural effusions, pneumothorax, and pleural tumors, including solitary fibrous tumors (pleural fibroma) and malignant mesothelioma. Preferred examples of lung tumors that can be treated include small cell carcinoma and poorly differentiated small cell carcinoma of the lung.

[0014] Examples of cellular proliferative and/or differentiative disorders of the colon include, but are not limited to, non-neoplastic polyps, adenomas, familial syndromes, colorectal carcinogenesis, colorectal carcinoma, and carcinoid tumors. Preferred examples of colon tumors include moderately differentiated tumors.

[0015] Examples of cellular proliferative and/or differentiative disorders of the ovary include, but are not limited to, ovarian tumors such as, tumors of coelomic epithelium, serous tumors, mucinous tumors, endometeriod tumors, clear cell adenocarcinoma, cystadenofibroma, brenner tumor, surface epithelial tumors; germ cell tumors such as mature (benign) teratomas, monodermal teratomas, immature malignant teratomas, dysgerminoma, endodermal sinus tumor, choriocarcinoma; sex cord-stomal tumors such as, granulosa-theca cell tumors, thecoma-fibromas, androblastomas, hill cell tumors, and gonadoblastoma; and metastatic tumors such as Krukenberg tumors.

[0016] Examples of prostatic cancerous disorders include adenocarcinoma or carcinoma, of the prostate and/or testicular tumors.

[0017] Examples of conditions characterized by an increase or decrease in angiogenesis include but are not limited to solid tumor growth and metastasis, psoriasis, endometriosis, Grave's disease, ischemic disease (e.g., atherosclerosis), and chronic inflammatory diseases (e.g., rheumatoid arthritis), and some types of eye disorders

[0018] “Treatment”, as used herein, is defined as the application or administration of a therapeutic agent to a patient, or application or administration of a therapeutic agent to an isolated tissue or cell line from a patient, who has a disease or disorder, a symptom of disease or disorder or a predisposition toward a disease or disorder, with the purpose of curing, healing, alleviating, relieving, altering, remedying, ameliorating, improving or affecting the disease or disorder, at least one symptom of disease or disorder or the predisposition toward a disease or disorder. A therapeutic agent includes, but is not limited to, small molecules, peptides, antibodies, ribozymes, gene therapy vectors and antisense oligonucleotides. Representative molecules are described herein.

[0019] The present invention is based, at least in part, on the discovery that nucleic acid and protein molecules, (described infra), are differentially expressed in disease states relative to their expression in normal, or non-disease states. The modulators of the molecules of the present invention, identified according to the methods of the invention, can be used to modulate (e.g., inhibit, treat, or prevent) or diagnose a disease, including, but not limited to, a cancer including but not limited to cancers of the lung, ovary, prostate, breast, colon or other disease state characterized by modulation of angiogenesis.

[0020] The modulators of the molecules of the present invention can include but are not limited to small organic molecules, peptides, ribozymes, nucleic acid antisense molecules, gene therapy vectors or antibodies.

[0021] “Differential expression”, as used herein, includes both quantitative as well as qualitative differences in the temporal and/or tissue expression pattern of a gene. Thus, a differentially expressed gene may have its expression activated or inactivated in normal versus disease conditions. The degree to which expression differs in normal versus disease or control versus experimental states need only be large enough to be visualized via standard characterization techniques, e.g., quantitative PCR, Northern analysis, subtractive hybridization. The expression pattern of a differentially expressed gene may be used as part of a prognostic or diagnostic of a disease, e.g., a cancer including but not limited to cancers of the lung, ovary, prostate, breast, colon or other disease state characterized by modulation of angiogenesis evaluation, or may be used in methods for identifying compounds useful for the treatment of a disease, e.g., a cancer including but not limited to cancers of the lung, ovary, prostate, breast or colon. In addition, a differentially expressed gene involved in a disease may represent a target gene such that modulation of the level of target gene expression or of target gene product activity will act to cure, heal, alleviate, relieve, alter, remedy, ameliorate, improve or affect a disease condition, e.g., a cancer including but not limited to cancers of the lung, ovary, prostate, breast, colon or other disease state characterized by modulation of angiogenesis. Compounds that modulate target gene expression or activity of the target gene product can be used in the treatment of a disease. Although the genes described herein may be differentially expressed with respect to a disease, and/or their products may interact with gene products important to a disease, the genes may also be involved in mechanisms important to additional disease cell processes.

[0022] Molecules of the Present Invention

[0023] The molecules of the present invention can be characterized as, or have structural features in common with, molecules of the following functional classes, including but not limited to:

[0024] Transferases:

[0025] MTAP/PNP family of phosphorylases

[0026] 2-oxo acid dehydrogenases acyltransferase

[0027] adenylate-kinase

[0028] 1-acyl-sn-glycerol-3-phosphate acyltransferase

[0029] AIR synthase and relatives

[0030] class II aldolase domain

[0031] Aminotransferases

[0032] AMP-binding enzymes

[0033] arginine N-methyltransferase

[0034] Arginosuccinate synthase

[0035] NAD:arginine ADP-ribosyltransferase

[0036] Asparagine synthase

[0037] Asp and Glu kinases

[0038] ATP:guanido phosphotransferases

[0039] ATP synthase

[0040] bile acid CoA:amino acid N-acyltransferase

[0041] Biopterin-dependent aromatic amino acid hydroxylase

[0042] biotin-requiring enzymes

[0043] Beta-ketoacyl synthase

[0044] biotin-protein ligase

[0045] Carbohydrate phosphorylases

[0046] carnitate acyltransferase

[0047] CDP-alcohol phosphatidyltransferase

[0048] choline transferases

[0049] CoA ligases

[0050] Coenzyme A transferase

[0051] Cys/Met metabolism PLP-dependent enzyme

[0052] diacylglycerol kinase

[0053] Delta-aminolevulinic acid dehydratase

[0054] Dihydrodipicolinate synthetase family

[0055] Enol-ase

[0056] FGGY carbohydrate kinase family

[0057] Formyl transferase

[0058] fucosyltransferases

[0059] Galactose-1-phosphate uridyl transferase

[0060] galactosyl-transferases

[0061] Phosphoribosylglycinamide synthetase (GARS)

[0062] Type 1 glutamine amidotransferases

[0063] Type II glutamine amidotransferases

[0064] gamma-glutamyltransferase

[0065] GHMP kinases

[0066] Glutamine synthetase

[0067] glycosyl tferases group 2

[0068] type 4 glycosyl transferases

[0069] Glycosyl transferases group 1

[0070] guanylate cyclases

[0071] Hexokinase

[0072] Hydroxymethylglutaryl-coenzyme A synthase

[0073] Lyase

[0074] vitamin-B 12 dependent methionine synthase

[0075] mRNA capping enzyme

[0076] arylamine N-acetyltransferase

[0077] nucleoside diphosphate kinase

[0078] glucosaminyl N-deacetylase/N-sulphotransferase

[0079] Myristoyl-CoA:protein N-myristoyltransferase

[0080] NNMT/PNMT/TEMT methyltransferase family

[0081] Nucleotidyl transferase

[0082] 6-O-methylguanine DNA methyltransferase

[0083] Orotidine phosphate decarboxylases

[0084] O-methyltransferase

[0085] OTCase/ATCase

[0086] phenylalanine and histidine ammonia-lyases

[0087] poly(ADP-ribose) polymerase

[0088] Phosphatidate cytidylyltransferase

[0089] phosphoenolpyruvate carboxykinase

[0090] pfkB family carbohydrate kinase

[0091] Phosphofructokinase

[0092] Phosphoglycerate kinases

[0093] phosphoinositol-3-kinases

[0094] phosphatidylinositol-4-phosphate 5-kinase

[0095] eukaryotic protein kinases

[0096] polyprenyl synthetases

[0097] protein prenyltransferases

[0098] Purine/pyrimidine phosphoribosyl transferases

[0099] Phosphoribosyl pyrophosphate synthetase

[0100] 6-pyruvoyl tetrahydropterin synthase

[0101] Pyridoxal-dependent decarboxylase

[0102] Pyridoxal-dependent decarboxylase conserved domain

[0103] pyridoxine kinases

[0104] pyruvate-kinase

[0105] Rhodanese

[0106] Ribosomal RNA adenine dimethylases

[0107] S-adenosylmethionine synthetase

[0108] SAICAR synthetase

[0109] Serine hydroxymethyltransferase

[0110] sialyltransferases

[0111] sterol O-acyltransferases

[0112] SpoU rRNA Methylase family

[0113] Squalene and phytoene synthases

[0114] serine/threonine dehydratases

[0115] sulfotransferases

[0116] Transaldolase

[0117] Trehalose-6-phosphate synthase domain

[0118] Tetrapyrrole (Corrin/Porphyrin) Methylases.

[0119] thymidine kinase

[0120] thiopurine methyltransferase

[0121] Thiamine Pyrophosphate requiring enzymes

[0122] Transglutaminase family

[0123] Transketolase

[0124] thymidylate synthase

[0125] ubiE/COQ5 methyltransferase family

[0126] UDP-glycosyltransferase

[0127] vitamin-K dependent gamma carboxylase

[0128] Oxidoreductases:

[0129] D-isomer specific 2-hydroxyacid dehydrogenase

[0130] 3-beta hydroxysteroid dehydrogenase/isomerase

[0131] 3-hydroxyacyl-CoA dehydrogenase

[0132] Acyl-CoA dehydrogenases

[0133] Zinc-containing alcohol dehydrogenases

[0134] adrenodoxin oxidoreductase

[0135] AhpC/TSA antioxidant enzyme family

[0136] aldehyde dehydrogenases

[0137] aldo/keto reductases

[0138] billiverdin reductase family

[0139] C-4 methyl sterol oxidase

[0140] C-5 cytosine-specific DNA methylase

[0141] cyclooxygenases

[0142] copper amine oxidases

[0143] FAD/NAD-binding Cytochrome reductase

[0144] D-amino acid oxidases

[0145] Molybdopterin binding domain in dehydrogenase

[0146] fatty acid desaturases

[0147] Dihydrofolate reductase

[0148] E1 dehydrogenases

[0149] Glutamate/Leucine/Phenylalanine/Valine dehydrogena

[0150] FAD-dependent glycerol-3-phosphate dehydrogenase

[0151] FMN-dependent dehydrogenase

[0152] Flavin-binding monooxygenase-like

[0153] Glucose-6-phosphate dehydrogenase

[0154] glutathione peroxidases

[0155] GMC oxidoreductases

[0156] IMP dehydrogenase/GMP reductase

[0157] Isocitrate and isopropylmalate dehydrogenases

[0158] lactate/malate dehydrogenase

[0159] lipoxygenase

[0160] NAD dependent epimerase/dehydratase family

[0161] NAD-dependent glycerol-3-phosphate dehydrogenase

[0162] NADH dehydrogenases

[0163] NADH-ubiquinone/plastoquinone oxidoreductase chain

[0164] Nitroreductase family

[0165] NO Synthase

[0166] Oxidoreductase FAD/NAD-binding domain

[0167] Delta 1-pyrroline-5-carboxylate reductase

[0168] 6-phosphogluconate dehydrogenases

[0169] Alanine dehydrogenase/pyridine nucleotide transhyd

[0170] Oxidoreductase molybdopterin binding domain

[0171] ribonuclease reductases

[0172] steroid 5-alpha reductases

[0173] short-chain dehydrogenase/reductases

[0174] Succinate dehydrogenase cytochrome b subunit

[0175] Tetrahydrofolate dehydrogenase/cyclohydrolase

[0176] UDP-glucose/GDP-mannose dehydrogenases

[0177] Hydrolases:

[0178] alpha/beta hydrolases

[0179] acid ceramidase

[0180] acylphosphatase

[0181] acyl-transferase

[0182] adenosine deaminase

[0183] S-adenosyl-L-homocysteine hydrolase

[0184] AdoMet decarboxylase

[0185] amidases

[0186] arginases

[0187] Asparaginase

[0188] aspartyl proteases

[0189] astacin/m12a metalloproteases

[0190] Prenyl protease 2

[0191] Eukaryotic carbonic anhydrases

[0192] carboxylesterase

[0193] C1p family of ATP-dependent proteases

[0194] 2′,3′ cyclic nucleotide 3′ phosphodiesterase

[0195] cytidine deaminases

[0196] disintegrin

[0197] dUTPase

[0198] esterases

[0199] Fructose-1-6-bisphosphatase

[0200] Alpha-L-fucosidase

[0201] metalloprotease family

[0202] Glycosyl hydrolase family 1

[0203] hyaluronidases

[0204] GTP cyclohydrolase I

[0205] haloacid dehalogenase-like hydrolases

[0206] hemoglobinase

[0207] heparanase

[0208] histone deacetylases

[0209] insulinase

[0210] lipoprotein lipase et al

[0211] lysophospholipases

[0212] peptidase family m17

[0213] metalloprotease family M41

[0214] leishmanolysin family of metalloproteases

[0215] M24 proteases

[0216] matrix metalloproteases

[0217] mutT/8-OXO-dGTPase

[0218] neprilysin family of proteases

[0219] nucleotide pyrophosphatase (alkaline phosphodieste

[0220] procollagen N-proteinase

[0221] 3′5′-cyclic nucleotide phosphodiesterase

[0222] ArgE/DapE/Acyl/Cpg2 family

[0223] Phosphorylase family

[0224] phospholipase A2

[0225] phospholipase C

[0226] phospholipase D

[0227] Porphobilinogen deaminase

[0228] pyrophosphatases

[0229] prolyl oligopeptidases

[0230] pyrimidine-nucleoside phosphorylases

[0231] GTPase-activators for Ras-like GTPases

[0232] renaldipeptidase

[0233] ADAM family of metalloprotease

[0234] serine carboxypeptidases

[0235] subtilase family of proteases

[0236] Sulfatase

[0237] Thioesterase domain

[0238] Thiolase

[0239] trehalase

[0240] trypsin-like serine proteases

[0241] Uracil-DNA glycosylase

[0242] Zinc carboxypeptidases

[0243] Zinc proteases

[0244] Isomerases:

[0245] enoyl-CoA hydratase/isomerase

[0246] sterol isomerase

[0247] Glucosamine-6-phosphate isomerase

[0248] Glyoxalase

[0249] Mannose-6-phosphate isomerase (fam1)

[0250] methylacyl-CoA racemase

[0251] Macrophage migration inhibitory factor (MIF)

[0252] Phosphoglucose isomerase

[0253] phosphoglucomutase/phosphomannomutase

[0254] Phosphoglycerate mutase family

[0255] Triosephosphate isomerase

[0256] tRNA pseudouridine synthase

[0257] Other Enzymes and Receptors:

[0258] phorbol ester/DAG binding domain

[0259] phospholipid scramblase

[0260] Nuclear hormone receptors

[0261] G-protein coupled receptors

[0262] Serine/threonine kinases

[0263] Tyrosine kinases

[0264] Dual specificity kinases

[0265] Gene ID 140

[0266] The human 140 sequence (SEQ ID NO:1), known also as N-formylpeptide receptor (fMLP-R26), is approximately 1281 nucleotides long including untranslated regions. The coding sequence, located at about nucleic acids 62 to 1114 of SEQ ID NO:1, encodes a 350 amino acid protein (SEQ ID NO:2).

[0267] As assessed by TaqMan expression analysis and in situ hybridization, 140 mRNA was found to be upregulated in a number of human tumors over normal control tissues, including but not limited to tumors of the breast, lung and colon. In addition, 140 mRNA was found to be upregulated in 3/3 glioblastomas as compared to normal brain samples. Due to its expression in a number of human tumors, modulators of 140 activity would be useful in treating human cancers, including but not limited to cancers of the breast, lung, colon and brain.

[0268] Further TaqMan studies show that 140 mRNA was expressed in a number of angiogenic tissues, including but not limited to mouse yolk sac, fetal liver, and angiogenic and tumorigenic islets cells from the mouse. Due to the increased expression of 140 mRNA in angiogenic tissues, modulators of 140 activity would be useful in treating conditions characterized by aberrant angiogenesis.

[0269] Gene ID 1470

[0270] The human 1470 sequence (SEQ ID NO:3), known also as protein kinase receptor (HEK2), is approximately 3805 nucleotides long including untranslated regions. The coding sequence, located at about nucleic acids 28 to 3024 of SEQ ID NO:3, encodes a 998 amino acid protein (SEQ ID NO:4).

[0271] As assessed by TaqMan analysis, 1470 mRNA was found to be upregulated in ovarian, prostate, colon (15×) and lung tumors when compared to normal human tissues. Further analysis showed increased expression in lung and colon tumors (4/4), liver metastases (1/1) and 16/16 colon to liver metastases. Phase II ACA (define): Upregulated expression in all stages of CRC (define) including 6/6 liver metastases. Gene 1470 or (EPB3/HEK2) belongs to the family of receptor tyrosine kinases (RTKs). In general, RTKs govern signal transduction signals that control cellular growth and differentiation. In particular, Ephrin type A+B receptor tyrosine kinases are known to be involved in axonal pathfinding, neurodevelopmental processes and the regulation of cellular proliferation. Defects in RTKs play a role in tumorigenesis.

[0272] The in situ hybridization (ISH) experiment for 1470 indicates that primary colon tumors and metastatic colon cancer to the liver are the primary tissues that express this gene. Normal colonic epithelium does not express 1470 mRNA. There is some expression in breast tumors and slight expression seen in one normal breast sample. Lung tumors do not appreciably express this gene.

[0273] 1470 is expressed and upregulated in colon tumors. 1470 mRNA was upregulated in 100% of liver metastases and >75% primary colon tumors studied as assessed by TaqMan analysis. 1470 is involved in proliferation pathways, as it is upregulated in adenomas from the APC^{min} mouse model. The involvement of 1470 in intracellular pathways indicates that 1470 would be useful as a target for a cancer therapeutic. Due to its increased expression in colon tumors indicate that modulators of 1470 activity would be useful therapeutics in treating cancer, including but not limited to cancers of the colon.

[0274] Gene ID 1686

[0275] The human 1686 sequence (SEQ ID NO:5), known also as human receptor-type tyrosine kinase (rse), is approximately 3949 nucleotides long including untranslated regions. The coding sequence, located at about nucleic acids 225 to 2897 of SEQ ID NO:5, encodes an 890 amino acid protein (SEQ ID NO:6).

[0276] As assessed by TaqMan analysis, 1686 mRNA was found to be upregulated in fetal adrenal gland, fetal kidney and fetal heart. In addition, it was found to be upregulated in angiogenic tissues, including but not limited to Wilm's tumors, glioblastomas and neuroblastomas. Further studies indicated that 1686 mRNA was upregulated in breast and lung tumors, proliferating endothelial cells and endothelial cells undergoing tube formation. Further, 1686 mRNA was upregulated in HUVEC and HMVEC treated with complete medium. Due to its increased expression in a number of human tumors and angiogenic tissue, modulators of 1686 activity would be useful as therapeutics in treating cancer and those conditions characterized by aberrant angiogenesis.

[0277] Gene ID 2089

[0278] The human 2089 sequence (SEQ ID NO:7), known also as a eukaryotic protein kinase, is approximately 2470 nucleotides long including untranslated regions. The coding sequence, located at about nucleic acids 171 to 2126 of SEQ ID NO:7, encodes a 651 amino acid protein (SEQ ID NO:8).

[0279] Expression of 2089 mRNA was determined in the following human breast cell lines:

[0280] MCF10A.m25, MCF10AT.c11, MCF10AT.c13, MCF10AT1, MCF10AT3B and MCF10CA1.c11. MCF10A cells are normal human breast epithelial cells, as they are near diploid, do not grow in soft agar and are nontumorigenic in nude mice. MCF10AT.c11 and MCF10AT.c13 cells are clones of the MCF10AT line, a T24 Hras-transfected MCF10A cell line. The MCF10AT cell line is tumorigenic as a pool, but these clones are not tumorigenic. MCF10AT1, MCF10AT3B and MCF10CA.c11 cells are cell lines derived from the in vitro expansion of cells taken from a MCF10AT(X)-derived xenograft tumors in nude mice. In comparison to MCF10AT1 cells, MCF10AT3B cells progress to invasive carcinomas more frequently. The MCF10CA1a.c11 cell line is the most rapidly tumorigenic. 2089 mRNA was found to be upregulated in the tumorigenic cell lines as compared to the non-tumorigenic cell lines.

[0281] TaqMan analysis showed moderate expression in many tumors, with high expression seen in lung and colon tumors. There was no expression of 2089 mRNA in normal human tissues. Further TaqMan analysis on 2089 mRNA showed that 2089 mRNA was upregulated in pools of tumors of the breast, ovary, colon and lung vs. respective normals, and high expression in colon to liver metastases, with expression seen in all metastatic tissues tested.

[0282] 2089 is a serine/kinase with increased expression in breast epithelial cells that have been transformed with activated H-ras. Additionally, expression was higher in primary solid tumors and metastases than in respective normal tissues. The increased expression of 2089 mRNA in tumors indicates that modulators of 2089 would be useful as therapeutics in treating cancer. 2089 would be useful as a target to identify cancer therapeutics.

[0283] Gene ID 2427

[0284] The human 2427 sequence (SEQ ID NO:9), known also as P2Y6 receptor, is approximately 1571 nucleotides long including untranslated regions. The coding sequence, located at about nucleic acids 277 to 1263 of SEQ ID NO:9, encodes a 328 amino acid protein (SEQ ID NO:10).

[0285] As assessed by TaqMan analysis 2427 mRNA was upregulated in tumor samples as compared to normal tissues. Due to the increased expression level of 2427 mRNA in tumor cells, modulators of 2427 activity have utility as cancer therapeutics.

[0286] Gene ID 3702

[0287] The human 3702 sequence (SEQ ID NO:11), known also as a tyrosine kinase is approximately 1467 nucleotides long including untranslated regions. The coding sequence, located at about nucleic acids 1 to 1467 of SEQ ID NO:1, encodes a 488 amino acid protein (SEQ ID NO:12).

[0288] As assessed by TaqMan analysis, 3702 mRNA was upregulated in lung, colon, breast and ovarian tumors as compared to the normal human tissue. In situ hybridization confirmed expression in the epithelial component of the tumor samples of 3702 mRNA.

[0289] 3702 is a src-family kinase. Members of this family are known oncogenes that play a role in cellular proliferation. Due to the increased expression of 3702, it may be acting to promote or maintain unregulated proliferation in tumor cells. Therefore, modulators of 3702 activity are useful as cancer therapeutics and 3702 polypeptides are useful to screen for small molecule modulators of 3702 activity.

[0290] Gene ID 5891

[0291] The human 5891 sequence (SEQ ID NO:13), known also as a human prolyl oligopeptidase, is approximately 2562 nucleotides long including untranslated regions. The coding sequence, located at about nucleic acids 1 to 2133 of SEQ ID NO:13, encodes a 710 amino acid protein (SEQ ID NO:14).

[0292] As assessed by TaqMan analysis, 5891 mRNA was upregulated in 4/4 colon tumors and 2/2 liver metastases as compared to the normal human tissue. Further TaqMan studies showed that 5891 mRNA was upregulated in 15/16 liver metastases over normal liver. In addition, 5891 mRNA was down regulated in HCT116 k-ras deficient cell lines.

[0293] Prolyl oligopeptidases are highly specific endopeptidases. These enzymes function to degrade a variety of proline-containing peptides such as Substance P. Activities of these enzymes cleave peptide bonds at the carboxy side of proline residues. Proline is the only cyclic amino acid, and it has a rigid structure. These factors prevent the classical serine endopeptidases to cleave peptide bonds containing proline. Prolyl oligopeptidases are the only proline specific endopeptidases currently known in mammals.

[0294] Prolyl oligopeptidases have been shown to have activity in a wide distribution of tissues. Literature has shown that prolyl oligopeptidase activity was significantly higher in human prostate, lung and sigmoid tumors when compared to healthy normal tissues. It has also been indicated that PE plays a role in cell cycle control.

[0295] 5891 is upregulated in colon carcinomas and colon to liver metastases. TaqMan analyses show that 5891 has elevated expression levels in>90% of all stages of colon carcinomas tested. Due to the high level of expression of 5891 in colon tumors, modulators of 5891 activity are useful as cancer therapeutics, including but not limited to colon cancer. 5891 polypeptides are useful in discovering small molecule modulators of 5891 activity.

[0296] Gene ID 6428

[0297] The human 6428 sequence (SEQ ID NO:15), known also as alpha enolase, is approximately 1755 nucleotides long including untranslated regions. The coding sequence, located at about nucleic acids 95 to 1399 of SEQ ID NO:15, encodes a 434 amino acid protein (SEQ ID NO:16).

[0298] As assessed by TaqMan analysis, 6428 mRNA was upregulated in colon, lung, ovarian and breast tumors. In addition, further TaqMan studies indicated that 6428 mRNA was increased in angiogenic tumors including but not limited to Wilms' tumors and glioblastomas, and fetal liver, heart and kidney. 6428 mRNA was upregulated at day 10.5 yolk sac and in proliferating endothelial cells and endothelial cells undergoing tube formation. Also, 6428 was upregulated in cells that were cultured under conditions of hypoxia.

[0299] Due to its expression pattern in a number of human tumor tissues and angiogenic tissues, modulators of 6428 activity would be useful as cancer therapeutics as therapeutics in conditions characterized by aberrant angiogenesis. 6428 polypeptides would be useful in screening therapeutic compounds.

[0300] Gene ID 7181

[0301] The human 7181 sequence (SEQ ID NO:17), known also as HU-K4, is approximately 2131 nucleotides long including untranslated regions. The coding sequence, located at about nucleic acids 488 to 1801 of SEQ ID NO:17, encodes a 437 amino acid protein (SEQ ID NO:18).

[0302] Gene ID 7660

[0303] The human 7660 sequence (SEQ ID NO:19), known as chemokine receptor D6, is approximately 1181 nucleotides long including untranslated regions. The coding sequence, located at about nucleic acids 13 to 1167 of SEQ ID NO:19, encodes a 384 amino acid protein (SEQ ID NO:20).

[0304] As assessed by TaqMan analyses, 7660 mRNA was upregulated in a number of ovarian tumors as compared to normal ovarian tissue. Therefor, due to this increased expression in ovarian tumors, modulators of 7660 activity are useful as cancer therapeutics. 7660 polypeptides are useful to screen for therapeutic modulators.

[0305] Gene ID 25641

[0306] The human 25641 sequence (SEQ ID NO:21), known also as histone deacetylase (HDAC9), is approximately 3036 nucleotides long including untranslated regions. The coding sequence, located at about nucleic acids 1 to 3036 of SEQ ID NO:21, encodes a 1011 amino acid protein (SEQ ID NO:22).

[0307] As assessed by TaqMan analyses, there was a significant increase in 25641 mRNA expression in breast and ovarian tumors vs. respective normals, with high levels of expression seen in brain, spinal cord, and cardiovascular tissues.

[0308] 25641 expression was increased in primary solid tumors and metastases in comparison to respective normal tissues. General histone deacetylase (HDAC) inhibitors are known to inhibit cell cycle and inhibit tumor progression in xenograft models. Therefore, due to the expression of 25641 in a number of human tumors, modulators of 25641 activity are useful as cancer therapeutic. 25641 polypeptides are useful in identifying modulators of 25641 activity.

[0309] Gene ID 69583

[0310] The human 69583 sequence (SEQ ID NO:23), is approximately 5549 nucleotides long including untranslated regions. The coding sequence, located at about nucleic acids 1 to 3111 of SEQ ID NO:23, encodes a 1036 amino acid protein (SEQ ID NO:24).

[0311] As assessed by TaqMan analysis, 69583 mRNA was upregulated in colon, lung and ovarian tumors. Expression was also seen in the kidney and pancreas. In situ hybridization confirmed the TaqMan results indicating that there was high level of 69583 mRNA in primary breast and ovarian tumors.

[0312] 69583 mRNA was upregulated in a number of tumors. Therefore, modulators of 69583 activity would be useful as cancer therapeutics. 69583 polypeptides would be useful to identify modulators of 69583 activity.

[0313] Gene ID 49863

[0314] The human 49863 sequence (SEQ ID NO:25), known also sphingosine kinase 1 (SPK-1), is approximately 1799 nucleotides long including untranslated regions. The coding sequence, located at about nucleic acids 359 to 1513 of SEQ ID NO:25, encodes a 384 amino acid protein (SEQ ID NO:26).

[0315] As assessed by TaqMan analysis, 49863 mRNA was upregulated in tumors of the lung, colon and ovary. In addition 49863 mRNA was upregulated in angiogenic tumors and fetal tissue. It was highly expressed in human microvascular endothelial cells. As assessed by ISH expression analysis, 49863 mRNA was upregulated in tumor epithelium and stroma of breast, lung, colon and angiogenic tissues. Due to its expression pattern and functional role, modulators of 49863 activity would be useful in treating cancer and conditions characterized by aberrant angiogenesis. 49863 polypeptides of the present invention would be useful in screening for modulators of 49863 activity.

[0316] Gene ID 8897

[0317] The human 8897 sequence (SEQ ID NO:27), known also as Acyl-Co A Dehydrogenase, is approximately 2682 nucleotides long including untranslated regions. The coding sequence, located at about nucleic acids 16 to 1314 of SEQ ID NO:27, encodes a 432 amino acid protein (SEQ ID NO:28).

[0318] As assessed by TaqMan expression analysis, 8897 mRNA was found to be upregulated in a number of human tumors over normal control tissues, including but not limited to tumors of the lung and colon. Due to its expression in a number of human tumors, modulators of 8897 activity would be useful in treating human cancers, including but not limited to cancers of the lung and colon. 8897 polypeptides of the present invention would be useful in screening for modulators of 8897 activity.

[0319] Gene ID 1682

[0320] The human 1682 sequence (SEQ ID NO:29), known also as Tau-Tubulin Kinase (TTK), is approximately 3866 nucleotides long including untranslated regions. The coding sequence, located at about nucleic acids 978 to 3551 of SEQ ID NO:29, encodes a 857 amino acid protein (SEQ ID NO:30).

[0321] As assessed by TaqMan analysis, 1682 mRNA was found to be upregulated expression in blood cells, lung, ovary, colon and breast tumors when compared to normal human tissues. Additional TaqMan analysis in rodent and human breast cancer panels showed that 1682 was expressed in a subset of breast, ovary, lung and colon tumors. 1682 or (TTK) expression is associated with cell proliferation belonging to the family of serine/threonine family of protein kinases. Members of this gene family are involved in cell cycle progression.

[0322] As assessed by TaqMan analysis, 1682 mRNA expression was upregulated in transformed and tumorigenic breast epithelial cells as compared to normal breast epithelial cells.

[0323] In situ hybridization experiments for 1682 indicate that primary breast and ovarian carcinomas express this gene preferentially. Modest expression is seen in a subset of primary colon and metastatic colon carcinomas to the liver.

[0324] Published data showed that 1682 expression was associated with rapidly proliferating tissues, including malignant tumors. These data indicate that 1682 is a target for discovering novel therapeutics useful in treating cancer. The increased expression of 1682 mRNA in breast epithelial cells indicate that modulators of 1682 activity would be useful therapeutics in treating cancer, including but not limited to cancers of the breast. 1682 polypeptides of the present invention would be useful in screening for modulators of 1682 activity.

[0325] Gene ID 17667

[0326] The human 17667 sequence (SEQ ID NO:31), known also as Carboxypeptidase D (CPD), is approximately 5801 nucleotides long including untranslated regions. The coding sequence, located at about nucleic acids 36 to 4169 of SEQ ID NO:31, encodes a 1377 amino acid protein (SEQ ID NO:32).

[0327] As assessed by TaqMan analysis, 17667 mRNA was ubiquitously expressed with significant upregulation in tumors of the breast, ovarian, lung, and colon. Additional TaqMan analysis in human breast cancer panels and oncology cell panels showed that 17667 was expressed in high to extremely high levels when compared to that of normal tissues. In situ hybridization experiments (ISH) demonstrated that 17667 is expressed in a subset of lung, breast, and colon tumors and in an ovarian metastasis.

[0328] 17667 (CPD) is a type I transmembrane protein with three tandem carboxypeptidase homology domains (Rehlil, T. F., et al, 1997; Ishikawa, T., et al, 1998). Two of these domains possess all of the catalytically important residues and a third domain is predicted to be catalytically inactive (Rehlil, T. F., et al, 1997; Ishikawa, T., et al, 1998). Human CPD is a homolog of duck gp180 and is a cellular receptor for avian hepatitis B virus entry (Breiner, K. M., et al, 1998). CPD is predominantly localized in the trans Golgi network (TGN) and cycles between the Golgi and the cell surface (Varlamov, O., et al, 1999). CPD is also found in immature, but not mature, secretory granules (Varlamov, O., et al, 1999), however, an isoform of CPD has been identified that is nuclear localized and inducible by prolactin in MCF-7 cells (Too, C. K., et al, 2001). CPD is believed to be involved in processing of proteins that transit the secretory pathway.

[0329] The high levels of 17667 mRNA seen in areas involved in tumors of the breast, ovary, lung and colon suggests that 17667 is involved in the processing of peptide hormones affecting tumor growth and/or survival. Therefore, inhibition of this 17667 would inhibit tumor progression. Modulators of 17667 activity would be useful therapeutics in treating cancer. 17667 polypeptides of the present invention would be useful in screening for modulators of 17667 activity.

[0330] Gene ID 9235

[0331] The human 9235 sequence (SEQ ID NO:33), known also as Glutamine Fructose-6-Phosphate Amidotransferase 1 (GFAT1), is approximately 3082 nucleotides long including untranslated regions. The coding sequence, located at about nucleic acids 123 to 2168 of SEQ ID NO:33, encodes a 681 amino acid protein (SEQ ID NO:34).

[0332] As assessed by TaqMan analysis, 9235 mRNA showed a higher expression in breast, lung, and colon tumor relative to normal colon tissues. Further experiments in an expanded colon and metastases panel showed generally higher expression in adenomas, stage B and C relative to normal colon tissues and higher expression in liver metastases relative to normal liver tissues.

[0333] The restricted pattern of 9235 mRNA expression in areas involved in tumors of the breast, lung and colon suggests that 9235 may be the rate-limiting enzyme in the hexosamine pathway determining the levels of UDP-GlcNAc-in the cell. Published data has shown that UDP-GlcNAc is a key modifier of proteins influencing tumor metastatic potential and oncogene transcriptional activity. Therefore, inhibition of 9235 would result in loss of metastatic potential and effect a decrease in signaling through proliferation, growth factor, and antiapoptosis pathways. Therefore, modulators of 9235 activity would be useful therapeutics in treating cancer. 9235 polypeptides of the present invention would be useful in screening for modulators of 9235 activity.

[0334] Gene ID 3703

[0335] The human 3703 sequence (SEQ ID NO:35), known also as a serine/threonine protein kinase, is approximately 3224 nucleotides long including untranslated regions. The coding sequence, located at about nucleic acids 65 to 1309 of SEQ ID NO:35, encodes a 414 amino acid protein (SEQ ID NO:36).

[0336] As assessed by TaqMan analysis 3703 mRNA was upregulated in colon and lung tumor samples as compared to normal tissues. Due to the increased expression level of 3703 mRNA in tumor cells, modulators of 3703 activity have utility as cancer therapeutics. 3703 polypeptides of the present invention would be useful in screening for modulators of 3703 activity.

[0337] Gene ID 14171

[0338] The human 14171 sequence (SEQ ID NO:37), known also as Protein Kinase C Delta-Interactin Kinase (DIK), is approximately 3860 nucleotides long including untranslated regions. The coding sequence, located at about nucleic acids 17 to 2371 of SEQ ID NO:37, encodes a 784 amino acid protein (SEQ ID NO:38).

[0339] As assessed by TaqMan expression analysis, 14171 mRNA expression was increased in ovary, colon and lung tumor samples as compared to their respective normal tissues. Kidney, pancreas and liver also expressed 14171 mRNA. Ovarian and breast cancer cell model panels showed that 14171 mRNA was expressed in many serous ovarian tumors and clear cell tumors as wells as primary breast tumors. A lung cancer cell model panel showed 14171 mRNA expression is reduced in H125 cells induced to express p53 vs. noninduced cells or induced vector control cells. The ISH experiment for 14171 indicates that lung and ovarian primary carcinomas show the greatest expression of this gene. The gene is expressed slightly less in colon primaries and colon metastasis to the liver. Normal epithelial cells are negative.

[0340] 14171 is a p53-repressed kinase that is expressed in tumors and interacts with PKCdelta. 14171 is involved in the negative regulations of proapoptotic functions of PKCdelta, thereby enhancing survival of tumor cells. Published data suggests that inhibition of this enzyme promotes apoptosis in tumor cells. Due to 14171 mRNA expression in a number of human tumors and its functional role, modulators of 14171 activity would be useful in treating human cancers, including but not limited to cancers of the ovary, colon, lung and breast. 14171 polypeptides of the present invention would be useful in screening for modulators of 14171 activity.

[0341] Gene ID 10359

[0342] The human 10359 sequence (SEQ ID NO:39), known also as Glutamine Phophoribosylpyrophosphate Amidotransferase (GPAT) is approximately 2153 nucleotides long including untranslated regions. The coding sequence, located at about nucleic acids 122 to 1675 of SEQ ID NO:39, encodes a 517 amino acid protein (SEQ ID NO:40).

[0343] As assessed by TaqMan analysis, 10359 mRNA was expressed in breast, ovary, prostate, colon, lung, brain and uterus tumor tissues as compared to their normal counterparts. Breast cancer cell model panels showed that 10359 mRNA expression was higher in estrogen receptor (ER) positive when compared to ER-negative breast tumor cell lines.

[0344] 10359 is a type-2 glutamine amidotransferase that catalyzes the first step in de novo purine biosynthesis. The activity of purine metabolizing enzymes, including amidophosphoribosyltransferase, has previously been shown to be increased in colon carcinomas versus normal mucosa. Rapidly proliferating cancer cells have increased nucleotide requirements. Increased expression of 10359 mRNA supports the increased nucleotide requirements of tumor cells. Therefore, inhibition of 10359 can inhibit tumor progression. Due to its increased expression in breast, ovary, prostate, colon, lung, brain and uterine tumors, and its functional role, modulators of 10359 activity would be useful in treating cancer. 10359 polypeptides of the present invention would be useful in screening for modulators of 10359 activity.

[0345] Gene ID 1660

[0346] The human 1660 sequence (SEQ ID NO:41), known also as a human receptor tyrosine kinase (RON), is approximately 4541 nucleotides long including untranslated regions. The coding sequence, located at about nucleic acids 29 to 4231 of SEQ ID NO:41, encodes a 1400 amino acid protein (SEQ ID NO:42).

[0347] As assessed by TaqMan analysis, 1660 mRNA was expressed the breast, ovary, lung, colon and small intestine tumors. Oncology tissue panels showed that 1660 was expressed in a subset of breast and colon tumors at higher levels than the respective normal tissue samples. Breast cancer tissue panels showed that 1660 was expressed in primary breast tumors at higher levels than normal breast samples. Colon cancer tissue panel showed that 1660 was expressed in stage C primary colon tumors and colon liver metastases in comparison to stage B tumors and normal colon tissues.

[0348] 1660 or (RON) functions as an oncogene by activating the beta-catenin pathway, as cells transfected with 1.660 have increased levels of phosphorylated beta-catenin, c-myc and cyclin D1 (Dnilkovitch-Miagkova et al., 2001). Published data has shown that 1660 is a receptor tyrosine kinase that is expressed at high levels in 50% of primary breast carcinomas (Maggiora et al., 1998). 1660 expression has also been shown in colon epithelial cells also protected against apoptotic death (Chen et al., 2000). Due to the increased expression of 1660 mRNA in a number of human tumors and its functional role, modulators of 1660 activity would be useful in treating cancer. 1660 polypeptides of the present invention would be useful in screening for modulators of 1660 activity.

[0349] Gene ID 1450

[0350] The human 1450 sequence (SEQ ID NO:43), known also as Fibroblast Growth Factor Receptor 4 Precursor (FGFR-4), is approximately 2915 nucleotides long including untranslated regions. The coding sequence, located at about nucleic acids 56 to 2464 of SEQ ID NO:43, encodes a 802 amino acid protein (SEQ ID NO:44).

[0351] TaqMan analysis showed 1450 mRNA expression in colon, lung, pancreas, liver, kidney was upregulated in the tumorigenic cell lines as compared to the non-tumorigenic cell lines. Oncology tissue panels showed 1450 mRNA expression in a subset of breast, colon and lung tumors. The colon liver metastasis samples also expressed much higher levels of 1450 mRNA than normal liver tissues. In ISH experiments, breast primary tumors, a subset of breast metastases, colon primary tumors and colon metastases to the liver were positive for 1450. One lung adenocarcinoma expressed 1450. No expression was observed in normal tissue for each tumor type examined.

[0352] 1450 or fibroblast growth factor receptor 4 (FGFR4) is a transmembrane tyrosine kinase receptor that binds acidic FGF (Ron et al., 1993). FGFs are also involved in cell proliferation, migration and differentiation in embryonic development, and tissue repair/injury response in adults (Ornitz et al., 2001). Inappropriate expression of some FGFs contributes to cancer pathogenesis (Id.). 1450 signaling can contribute to the proliferation and increase invasive properties of tumor cells and the inhibition of 1450 will inhibit tumor progression. The increased expression of 1450 mRNA in tumors indicates that modulators of 1450 would be useful as in treating cancer. 1450 polypeptides of the present invention would be useful in screening for modulators of 1450 activity.

[0353] Gene ID 18894

[0354] The human 18894 sequence (SEQ ID NO:45), known also as an Endothelial Lipase, is approximately 3927 nucleotides long including untranslated regions. The coding sequence, located at about nucleic acids 253 to 1755 of SEQ ID NO:45, encodes a 500 amino acid protein (SEQ ID NO:46).

[0355] As assessed by TaqMan expression analysis, 18894 mRNA expression was increased in ovary, kidney, liver, and colon tumor samples as compared to their respective normal tissues. Ovarian and angiogenesis cancer cell model panels showed that 18894 was expressed in many serous ovarian tumors and clear cell tumors as wells as cervical tumors.

[0356] Endothelial lipase is an extracellular enzyme attached to the endothelial surface involved in binding and hydrolysis of lipoproteins and internalization of their products.

[0357] Binding of endothelial lipase increases the proliferation of endothelial cells, partly mediated by binding of lipoproteins inhibition of endothelial lipase would be expected to be antiangiogenic. Due to 18894 mRNA expression in angiogenic tissues, including clear cell carcinoma of the ovary, discovering modulators of 18894 activity would be useful in treating human cancers, including but not limited to cancers of the ovary, colon, kidney and liver, along with diseases characterized by aberrant angiogenesis. 18894 polypeptides of the present invention would be useful in screening for modulators of 18894 activity.

[0358] Gene ID 2088

[0359] The human 2088 sequence (SEQ ID NO:47), known also as Tousled-Like Kinase or PKU-beta, is approximately 4299 nucleotides long including untranslated regions. The coding sequence, located at about nucleic acids 213 to 2576 of SEQ ID NO:47, encodes a 787 amino acid protein (SEQ ID NO:48).

[0360] As assessed by TaqMan analysis, 2088 mRNA expression was increased in brain tumor samples as compared to the respective normal tissues. 2088 mRNA expression was also upregulated in endothelia cultures and during EC tube formation. In Oncology panels, 2088 mRNA is expressed at a relatively high level in HUVEC culture and up-regulated in prostate, colon, and lung tumors. The expression of 2088 mRNA is upregulated in 1/6 breast tumors, 6/6 lung tumors and 1/5 colon tumors as compared to normal tissues. In an Angiogenesis panel, the expression of 2088 mRNA is upregulated in human fetal tissues, 4/7 hemangiomas, 3/5 Wilm's tumors, 3/3 lung tumors, 3/3 colon tumors, and 1/5 cervix tumors as compared to adult normal tissues. 2088 mRNA expression levels are also high in glioblastomas.

[0361] ISH experiments showed upregulation of 2088 mRNA in Wilm's, cervical and lung tumor cells and associated stroma. Colon cancer cells had significantly upregulated 2088 mRNA in tumor epithelium.

[0362] 2088 is a tousled-like kinase with an Asf1 homolog as a substrate. 2088 activity promotes assembly of the nucleosome on newly synthesized DNA. 2088 activity also promotes S-phase progression and inhibits the DNA replication checkpoint. Inhibition of 2088 would inhibit S-phase progression and promote the DNA replication checkpoint, preventing endothelial cell proliferation and enhancing DNA damage sensitivity of cancer cells. Due to 2088 expression in a number of human tumors, modulators of 2088 activity would be useful in treating human cancers, as well as diseases characterized by aberrant angiogenesis. 2088 polypeptides of the present invention would be useful in screening for modulators of 2088 activity.

[0363] Gene ID 32427

[0364] The human 32427 sequence (SEQ ID NO:49) known also as long chain fatty acid CoA ligase 5 (LACS5), is approximately 3371 nucleotides long including untranslated regions. The coding sequence, located at about nucleic acids 114 to 2333 of SEQ ID NO:49, encodes a 739 amino acid protein (SEQ ID NO:50).

[0365] As assessed by TaqMan analysis, 32427 mRNA was found to be upregulated in lung and colon tumors when compared to normal control tissues. As assessed by ISH, low levels of expression of 32427 mRNA are seen in the normal epithelium of ovary and lung tissues, with markedly increased expression in the epithelium of tumors derived from these tissues. 32427 mRNA showed high levels of expression in both normal and tumor epithelium in the colon.

[0366] 32427 activates fatty acids for both synthesis of cellular lipids and degradation via β-oxidation. 32427 protein localizes to mitochondria and is increased during fasting, suggesting that 32427's primary role is in β-oxidation of lipids for energy production. 32427 is upregulated by kras in tumor cells under conditions in which nutrients are limiting (i.e. unvascularized or poorly vascularized tumors). Due to 32427 mRNA expression in lung and colon tumors, along with its functional role, modulators of 32427 activity would be useful in treating human cancers, including but not limited to cancers of the lung and colon. 32427 polypeptides of the present invention are useful in screening for modulators of 32427 activity.

[0367] Gene ID 2160

[0368] The human 2160 sequence (SEQ ID NO:51), known also as MAPK-activated protein kinase (Mnk1), is approximately 2617 nucleotides long including untranslated regions. The coding sequence, located at about nucleic acids 188 to 1462 of SEQ ID NO:51, encodes a 424 amino acid protein (SEQ ID NO:52).

[0369] As assessed by TaqMan analysis, 2160 mRNA was found to be upregulated in colon and lung tumors relative to respective normal tissues. Oncology model panels showed a high level of expression of 2160 in lung tumors when compared to normal lung tissue. Colon model panels showed an increased expression of 2160 in colon metastases when compared to normal colon tissue.

[0370] 2160 or Mnk1 is a serine/threonine kinase which is phosphorylated and activated by ERK1, ERK2, and p38 MAP kinases. 2160 or Mnk1 is involved in the regulation of the phosphorylation of the cap-binding protein, eIF4E. 2160 or Mnk1 is recruited by eIF4G to activate eIF4E for the translation of proteins involved in mitosis. Therefore, an increased expression of 2160 in tumors contributes to higher rates of proliferation by increasing the translation of mitotic proteins. Due to 2160 expression in a colon and lung tumors, along with its functional role, modulators of 2160 activity would be useful in treating human cancers, including but not limited to cancers of the lung and colon. 2160 polypeptides of the present invention are useful in screening for modulators of 2160 activity.

[0371] Gene ID 9252

[0372] The human 9252 sequence (SEQ ID NO:53), known also as a serine hydroxymethyl transferase (cSHMT), is approximately 1599 nucleotides long including untranslated regions. The coding sequence, located at about nucleic acids 13 to 1464 of SEQ ID NO:53, encodes a 483 amino acid protein (SEQ ID NO:54).

[0373] As assessed by TaqMan analysis, 9252 mRNA expression was shown to be increased in lung and colon tumors when compared to respective normal lung and colon tissues. Cell model panels showed transient decreased expression upon p53 activation and increased expression in 1/2 kras transformed cell lines. As assessed by ISH analysis, 9252 mRNA had low to moderate levels of expression in epithelium of lung and colon tumors with no expression evident in normal epithelium of the bronchiole or colon.

[0374] 9252 or cSHMT is a key regulator of folate-activated one-carbon units that are required for purine, thymidine, and methionine biosynthesis. Enhanced 9252 or cSHMT expression increases the available pools of nucleotides that are required for DNA synthesis in rapidly proliferating cells. Due to 9252 expression in a lung and colon tumors, along with its functional role, modulators of 9252 activity would be useful in treating human cancers, including but not limited to cancers of the lung and colon. 9252 polypeptides of the present invention are useful in screening for modulators of 9252 activity.

[0375] Gene ID 9389

[0376] The human 9389 sequence (SEQ ID NO:55), known also as hydroxymethylglutaryl-COA synthase (HMG-COA), is approximately 1650 nucleotides long including untranslated regions. The coding sequence, located at about nucleic acids 22 to 1584 of SEQ ID NO:55, encodes a 520 amino acid protein (SEQ ID NO:56).

[0377] As assessed by TaqMan analysis, 9389 mRNA was found to be upregulated in lung and breast tumors when compared to normal control tissues. Further analysis also showed that 9389 was downregulated by p53 and upregulated by mutant kras. In addition, Her2/neu overexpression and EGF or IGF treatment both increased 9389 levels in breast cancer cells.

[0378] 9389 or HMG-CoA synthase functions in the cholesterol biosynthesis pathway, converting acetyl-CoA to 3-hydroxy-3-methyl-glutaryl-CoA (HMG-CoA). Downstream products of this pathway are required for the farnesylation or geranylation of the kras protein, which in turn is strictly required for its membrane association and signaling activity. Increased expression of 9389 or HMG-CoA synthase would potentially increase the levels of active, membrane associated kras in the cell. In addition, drugs that inhibit this pathway have also shown to have anti-tumorigenic effects. Due to 9389 expression in a lung and breast tumors, along with its functional role, modulators of 9389 activity would be useful in treating human cancers, including but not limited to cancers of the lung and breast. 9389 polypeptides of the present invention are useful in screening for modulators of 9389.

[0379] Gene ID 1642

[0380] The human 1642 sequence (SEQ ID NO:57), known also as a NIMA-related protein kinase 2 (NEK2), is approximately 2051 nucleotides long including untranslated regions. The coding sequence, located at about nucleic acids 83 to 1420 of SEQ ID NO:57, encodes a 445 amino acid protein (SEQ ID NO:58).

[0381] As assessed by TaqMan analysis, 1642 mRNA was found to be upregulated in breast, ovary, lung and colon tumors compared to normal control tissues. Further breast cancer model panels showed that 1642 was upregulated in breast cancer tumors when compared to respective normal breast tissues. Further TaqMan analysis showed 1642 mRNA is expressed at increased levels in 7/7 primary ovarian tumors and 7/7 ovarian omentum metastases vs. 6/6 normal ovary tissue samples.

[0382] 1642 is a human homologue of NIMA (47% identity in catalytic domains) and is also known as NIMA-like kinase1 (NLK1) or is NIMA-related kinase (NEK2). Published literature indicates that NIMA kinase activity is cell cycle regulated, with high activity at mitosis (G2/M) and low activity in S-phase (Osmani et al., 1991). 1642 or Nek2 resembles NIMA in its primary structure, cell cycle regulation and substrate specificity, suggesting that Nek2 would potentially be required for mitosis. Due to the increased expression of 1642 in transformed and tumorigenic breast epithelial cells suggests that Nek2 would be a potential therapeutic target for cancer cells. Therefore, discovering modulators of 1642 activity would be useful in treating human cancers, including but not limited to cancers of the breast, ovary, lung and colon. 1642 polypeptides of the present invention are also useful in screening for-modulators of 1642 activity.

[0383] Gene ID 85269

[0384] The human 85269 sequence (SEQ ID NO:59) is approximately 1548 nucleotides long including untranslated regions. The coding sequence, located at about nucleic acids 115 to 1203 of SEQ ID NO:59, encodes a 362 amino acid protein (SEQ ID NO:60).

[0385] As assessed by TaqMan analysis, 85269 mRNA was found to be upregulated in a subset of ovarian, colon and breast tumors when compared to respective normal tissues. Oncology model panels showed and increase level of 85269 mRNA in breast and ovary tumors in comparison to respective normal tissues.

[0386] Activation or overexpression of cellular growth factors and their receptors, including EGFR and EGF/TGFalpha are implicated in the development and progression of breast cancer. Many mouse experiments demonstrate the ability of EGF and TGFalpha to promote mammary tumorigenesis, and members of this family are commonly overexpressed in human breast cancers. 85269 expression in human ovarian, colon and breast cancers suggests that 85269 plays an important role in tumor cell survival and growth. Therefore, discovering modulators of 85269 activity would be useful in identifying potential targets for therapeutic intervention in cancers, including but not limited to cancers of the ovary, colon and breast. In addition, 85269 polypeptides of the present invention are useful in screening for modulators of 85269 activity.

[0387] Gene ID 10297

[0388] The human 10297 sequence (SEQ ID NO:61) known also as purine nucleoside phosphorylase (PNP), is approximately 1418 nucleotides long including untranslated regions. The coding sequence, located at about nucleic acids 110 to 979 of SEQ ID NO:61, encodes a 289 amino acid protein (SEQ ID NO:62).

[0389] As assessed by TaqMan analysis, 10297 was shown to be upregulated in breast, ovary, lung and colon tumors when compared to normal control tissues. Further analysis showed that 10297 was upregulated in fetal tissue and angiogenic tumors. 10297 expression in a breast, ovary, lung and colon tumors suggest a role of 10297 in angiogenesis and tumorigenesis. Therefore, discovering modulators of 10297 activity would be useful in treating human cancers, including but not limited to cancers of the breast, ovary, lung and colon, and conditions characterized by aberrant angiogenesis. In addition, 10297 polypeptides of the present invention would also be useful in screening for modulators of 10297 activity.

[0390] Gene ID 1584

[0391] The human 1584 sequence (SEQ ID NO:63) known also as a serine/threonine kinase PCTAIRE-1, is approximately 1745 nucleotides long including untranslated regions. The coding sequence, located at about nucleic acids 124 to 1614 of SEQ ID NO:63, encodes a 496 amino acid protein (SEQ ID NO:64).

[0392] As assessed by TaqMan analysis, 1584 mRNA was found to be upregulated in breast, ovary, lung and colon tumors. Further analysis also showed 1584 mRNA to be upregulated in proliferating EC and EC tube formation, fetal tissue, hemangiomas and angiogenic tumors. 1584 expression in a breast, ovary, lung and colon tumors suggest a role of 1584 in angiogenesis and tumorigenesis. Therefore, discovering modulators of 1584 activity would be useful in treating human cancers, including but not limited to cancers of the breast, ovary, lung and colon, and in conditions characterized by aberrant angiogenesis. In addition, 1584 polypeptides of the present invention would also be useful in screening for modulators of 1584 activity.

[0393] Gene ID 9525

[0394] The human 9525 sequence (SEQ ID NO:65), known also as a diacylglycerol kinase, is approximately 6207 nucleotides long including untranslated regions. The coding sequence, located at about nucleic acids 81 to 3590 of SEQ ID NO:65, encodes a 1169 amino acid protein (SEQ ID NO:66).

[0395] As assessed by TaqMan analysis, 9525 mRNA was upregulated in fetal tissue, hemangiomas and angiogenic tumors when compared to normal control tissues. Further TaqMan analysis indicated that 9525 mRNA was up regulated in endothelial tube (EC) formation.

[0396] 9525 is a diacylglycerol kinase (DGK). DGKs regulate the levels of two important signaling molecules, diacylglycerol and phosphatidic acid. Phosphatidic acid is a mitogenic phospholipid that interacts directly with Raf-1, recruiting it to the membrane and allowing it to interact with Ras. Tumor cells upregulate DGKd to maximize the mitogenic signal through the Ras pathway. Inhibition of DGKd will downregulate c-myc, c-fos, c-raf, and cyclin D3, resulting in inhibition of proliferation of tumor cells. Due to 9525 mRNA expression in fetal tissue, hemangiomas and angiogenic tumors, along with its functional role, modulators of 9525 activity would be useful in treating human cancers. 9525 polypeptides of the present invention are useful in screening for modulators of 9525 activity.

[0397] Gene ID 14124

[0398] The human 14124 sequence (SEQ ID NO:67), known also as Cyclin G-associated kinase (HsGAK), is approximately 4331 nucleotides long including untranslated regions. The coding sequence, located at about nucleic acids 1 to 3936 of SEQ ID NO:67, encodes a 1311 amino acid protein (SEQ ID NO:68).

[0399] As assessed by TaqMan analysis, 14124 mRNA was upregulated in breast, lung and colon tumors when compared to normal control tissues. Further TaqMan analysis showed that 14124 mRNA was upregulated in fetal tissue, hemangiomas and angiogenic tumors. 14124 mRNA was also upregulated in proliferating endothelial cell (EC) and EC tube formation. ISH expression analysis confirms the TaqMan results in lung, colon, fetal and angiogenic tissues. The expression patterns of 14124 indicate a potential role of 14124 in tumorigenesis and angiogenesis. Due to 14124 mRNA expression in breast, lung and colon tumors, along with its functional role, modulators of 14124 activity would be useful in treating human cancers, including but not limited to cancers of the breast, lung and colon. 14124 polypeptides of the present invention are useful in screening for modulators of 14124 activity.

[0400] Gene ID 4469

[0401] The human 4469 sequence (SEQ ID NO:69), known also as HSNFRK, is approximately 5519 nucleotides long including untranslated regions. The coding sequence, located at about nucleic acids 642 to 2939 of SEQ ID NO:69, encodes a 765 amino acid protein (SEQ ID NO:70).

[0402] As assessed by TaqMan analysis, 4469 mRNA was upregulated breast, lung, and prostate tumors when compared to normal control tissues. Further TaqMan analysis showed that 4469 mRNA was upregulated in fetal tissue, hemangiomas and angiogenic tumors. 4469 mRNA was upregulated in proliferating endothelial cells (EC), EC tube formation, growth factor-treated ECs and endothelial culture. 4469 mRNA was also upregulated in hypoxia treated human microvascular endothelial cells (HMVEC). As assessed by ISH analysis, 4469 mRNA was upregulated in colon, lung and ovary tumor samples. It also showed that 4469 mRNA is expressed in endothelial cells of hemangiomas, Wilm's tumors, renal cell carcinoma, and fetal adrenal. In the Wilm's tumors and fetal adrenal samples, the cells expressing 4469 mRNA are epithelial cells and cells in vessels.

[0403] The expression patterns of 4469 indicate a potential role of 4469 in tumorigenesis and angiogenesis. Due to 4469 mRNA expression in breast, lung, and prostate tumors, along with its functional role, modulators of 4469 activity would be useful in treating human cancers, including but not limited to cancers of the breast, lung, and prostate. 4469 polypeptides of the present invention are useful in screening for modulators of 4469 activity.

[0404] Gene ID 8990

[0405] The human 8990 sequence (SEQ ID NO:71), known also as Non-hepatic arginase (Kidney-type arginase) or arginase type II, is approximately 1354 nucleotides long including untranslated regions. The coding sequence, located at about nucleic acids 21 to 1085 of SEQ ID NO:71, encodes a 354 amino acid protein (SEQ ID NO:72).

[0406] As assessed by TaqMan analysis, 8990 mRNA was upregulated in lung tumors when compared to normal control tissues.

[0407] The pro-apoptotic action of nitric oxide synthase inhibitors (like NG-monomethyl-L-arginine) is manifested through inhibition of the arginase pathway. These inhibitors cause apoptosis in cell cultures and inhibit the growth of various transplantable tumors (Szende B et at 2001 Cancer Cell Int. December 17; 1(1):3). N-hydroxy-L-argenine (NOHA), an intermediate in the nitric oxide synthetic pathway and an inhibitor of arginase, significantly reduces intracellular polyamines, activates caspase-s, and induces apoptosis in the breast cancer cell line (MDA-MB-468) (Singh R, et al 2001 Carcinogenesis November; 22(11):1986-9). 8990 or arginase is the first step in arginine degradation in the urea cycle. Therefore, 8990 or arginase plays a potential role in the regulation of extra-urea cycle, arginine metabolism, and down-regulation of nitric oxide synthesis. Due to 8990 mRNA expression in lung tumors, along with its functional role, modulators of 8990 activity would be useful in treating human cancers including but not limited to cancers of the lung. 8990 polypeptides of the present invention are useful in screening for modulators of 8990 activity.

[0408] Gene ID 2100

[0409] The human 2100 sequence (SEQ ID NO:73), known also as a protein kinase C-like 1 (PKL1), is approximately 2988 nucleotides long including untranslated regions. The coding sequence, located at about nucleic acids 85 to 2913 of SEQ ID NO:73, encodes a 942 amino acid protein (SEQ ID NO:74).

[0410] As assessed by TaqMan analysis, 2100 mRNA was upregulated in breast, colon and liver tumors when compared to normal control tissues. Further TaqMan analysis indicated that 2100 mRNA had regulated expression in ovary and colon tumors, as well as, colon, omentum and fallopian tube metastases when compared to normal control tissues. Further TaqMan analysis also indicated that substantially higher expression of 2100 mRNA was detected in colon metastases compared to normal colon and liver. There was increased expression of 2100 mRNA detected in poorly differentiated non-small cell lung carcinomas compared to normal and adenocarcinoma lung tissue and decreased expression of 2100 mRNA was detected in the p16 induction model and the p53 induction model, relative to uninduced controls and vector-transfected controls. As assessed by ISH analysis, 2100 mRNA is expressed in primary tumors of the colon, breast, lung, and ovary. Lung tumor expression is most abundant in small cell lung carcinoma. Colon metastases to the liver also show expression, but to a lesser degree than primary colon tumors. Normal tissues show some expression in ovarian tissue, but normal lung, colon, and breast are negative for 2100 mRNA expression.

[0411] 2100 is a protein kinase C-like 1 (PKL1). 2100 mediates GTPase Rho-dependent signaling. 2100 is upregulated in colon tumor samples and higher expression may favor growth and survival. Selective inhibition of 2100 results in reduced survival of tumor cells. Due to 2100 mRNA expression in breast, colon and liver tumors, along with its functional role, modulators of 2100 activity would be useful in treating human cancers, including but not limited to cancers of the breast, colon and liver. 2100 polypeptides of the present invention are useful in screening for modulators of 2100 activity.

[0412] Gene ID 9288

[0413] The human 9288 sequence (SEQ ID NO:75), known also as fumarylacetoacetate hydrolase (FAH), is approximately 1447 nucleotides long including untranslated regions. The coding sequence, located at about nucleic acids 57 to 1316 of SEQ ID NO:75, encodes a 419 amino acid protein (SEQ ID NO:76).

[0414] As assessed by TaqMan analysis, 9288 mRNA was expressed at highest levels in erythroid cells, adipose and liver tissues. Further TaqMan analysis showed increased expression in a colon tumor pool relative to the normal colon tissue pool. Oncology tissue panels indicated that 9288 mRNA was expressed at high levels in three breast tumor samples (IDC-MD/PD, IDC-PD and ILC), all of which expressed the highest levels of the oncogenic receptor tyrosine kinase (Her-2). Breast cancer tissue panels indicated that 9288 was overexpressed in more than half of the primary breast tumor samples when compared to normal control tissues. In addition, 9288 mRNA was expressed at high levels in ZR-75 cells in breast cancer cell model panels. Her-2 cell model panels, indicated that 9288 was up regulated in MCF10A single clones which overexpress the wild type oncogenic receptor tyrosine kinase (Her-2).

[0415] 9288 or Fumarylacetoacetate hydrolase (FAH) is the enzyme deficient in hereditary tyrosimenia type I patients (HT1) (Tanguay, R. M., et al., 1996, Tyrosine and its catabolites: from disease to cancer, Acta Biochim Pol 43(1):209-216; Jorquera, R. and R. M. Tanguay, 2001, Rumarylacetoacetate, the metabolite accumulating in hereditary tyrosinemia, activates the ERK pathway and induces mitotic abnormalities and genomic instability, Hum Mol Genet 10(17): 1741-1752). 9288 catalyzes the reaction 4-fumarylacetoacetate (FAA)+water to acetoacetate+fumarate. 9288 is involved in the last step in the degradation of the amino acid tyrosine. In the absence of 9288, the mutagenic metabolite fumarylacetoacetate (FAA) accumulates. Fumarylacetoacetate (FAA) is responsible for the increased incidence of hepatocellular carcinoma associated with HT1 patients (Tanguay, R. M., et al., 1996, Tyrosine and its catabolites: from disease to cancer, Acta Biochim Pol 43(1):209-216). In addition, fumarylacetoacetate causes organelle/mitotic spindle disturbances that contributes to genetic instability (Jorquera, R. and R. M. Tanguay, 2001, Rumarylacetoacetate, the metabolite accumulating in hereditary tyrosinemia, activates the ERK pathway and induces mitotic abnormalities and genomic instability, Hum Mol Genet 10(17): 1741-1752). The increase in cancer due to 9288 or fumarylacetoacetate hydrolase (FAH) loss is attributed to cumulative mutagenic effects on FAH deficient individuals through time.

[0416] Another enzyme that is involved in regulating intracellular fumarate levels is fumarate hydratase (FH), a mitochondrial enzyme catalyzing the seventh step of citric acid cycle. Fumarate hydratase (FH) catalyzes L-malate formation from fumarate hydration. Published literature describes the mapping of fumarate hydratase (FH) as the gene with germline mutations that predisposes individuals to uterine fibroids, skin leiomyomata and papillary renal cell cancer (Tomlinson, I. P., et al, 2002, Germline mutations in FH predispose to dominantly inherited uterine fibroids, skin leiomyomata and papillary renal cell cancer, Nat Genetics 30(4): 402-410). Fumarate hydratase (FH) mutations in these individuals results in low or absent FH activity in their tumors. Loss of fumarate hydratase (FH) function causes an accumulation of fumarate leading to tumor formation (Rustin, P., 2002, Mitochondria, from cell death to proliferation, Nat Genetics 30(4): 352-353). Therefore, increased 9288 or fumarylacetoacetate hydrolase (FAH) activity leads to an accumulation of fumarate and subsequent tumor formation. Inhibition of 9288 or fumarylacetoacetate hydrolase (FAH) activity decreases fumarate levels and its tumor promoting effects. Due to 9288 mRNA expression in erythroid cells, adipose tissue and liver, along with its functional role, modulators of 9288 activity would be useful in treating human cancers. 9288 polypeptides of the present invention are useful in screening for modulators of 9288 activity.

[0417] Gene ID 64698

[0418] The human 64698 sequence (SEQ ID NO:77), known also as a sphingosine kinase 2 (SPK2), is approximately 2380 nucleotides long including untranslated regions. The coding sequence, located at about nucleic acids 7 to 1863 of SEQ ID NO:77, encodes a 618 amino acid protein (SEQ ID NO:78).

[0419] As assessed by TaqMan analysis, 64698 mRNA was upregulated in brain, erythroid cells, breast and lung tumors. Further TaqMan analysis indicated that 64698 mRNA was increased two-fold in the colon tumor pool when compared to normal colon tissues. Expanded lung cancer tissue panels, indicated that 64698 mRNA was expressed at moderate to low levels in many lung tumors. Expanded ovarian cancer xenograft panels, indicated that 64698 mRNA was expressed at highest levels in plastic-grown SKOV3 cells. Ovarian cell model panels, indicated that 64698 mRNA was increased in SKOV3 variant cells when compared with SKOV3WT cells. In addition, Oncology xenograft cell line panels indicated that 64698 mRNA was expressed at high levels in most tumor cell lines.

[0420] The conversion of ceramide into sphingosine and sphingosine 1-phosphate (SIP) determines cell fate. Published data indicates ceramide induces apoptosis (caspase activation), whereas SIP induces cell survival. 64698 or Sphingosine kinases (SPK2), catalyzes the phosphorylation of sphingosine to sphingosine 1-phosphate. Overexpression of sphingosine kinase 1 (SPK2), in NIH3T3 cells and HEK293 cells promotes cell growth in low serum medium, the G1/S transition, DNA synthesis, and increased cell number (Pyne, S. and N. J. Pyne, 2000, Sphingosine 1-phosphate signaling in mammalian cells, Biochem J. 349: 385-402). Overexpression of 64698, also protects against apoptosis induced by serum deprivation, ceramide, or anti-Fas. Importantly, the 64698 inhibitor, N N-dimethylsphingosine, blocks the protective effect of overexpression. These effects are a result of the extracellular and intracellular roles of SIP or by preventing the accumulation of proapoptotic ceramide (Pyne, S. and N. J. Pyne, 2000, Sphingosine 1-phosphate signaling in mammalian cells, Biochem J. 349: 385-402.). In addition, overexpression of 64698, can transform cells in vitro causing them to become tumorigenic in immunocompromised mice (Xia, P., et. al., 2000, An oncogenic role of sphingosine kinase, Curr. Biol. 10(23): 1527-1530).

[0421] Tumor cells upregulate 64698 or sphingosine kinase 2 to reduce the cellular pool of sphingosine available as a substrate for ceramidase. Increased production of sphingosine 1-phosphate promotes cell survival via its role as a ligand to EDG receptors and some possible intracellular roles. Inhibition of sphingosine kinase 2 allows for inherent apoptotic signals to increase ceramide levels, Due to 64698 mRNA expression in brain, erythroid cells, breast and lung tumors, along with its functional role, modulators of 64698 activity would be useful in treating human cancers, including but not limited to cancers of the brain, breast, lung and colon. 64698 polypeptides of the present invention are useful in screening for modulators of 64698 activity.

[0422] Gene ID 10480

[0423] The human 10480 sequence (SEQ ID NO:79), known also as Succinyl CoA:3-oxoacid CoA-transferase, is approximately 3337 nucleotides long including untranslated regions. The coding sequence, located at about nucleic acids 99 to 1661 of SEQ ID NO:79, encodes a 520 amino acid protein (SEQ ID NO:80).

[0424] As assessed by TaqMan analysis, 10480 mRNA showed broad expression in normal tissues. 10480 mRNA showed increased expression in 6/6 lung tumors when compared to normal tissues with no increase seen in other tumor types. 10480 mRNA also showed late downregulation in cells expressing active p53. 10480 mRNA was also identified in immortalized bronchial epithelial cells transformed with mutant kras.

[0425] 10480 or Succinyl-CoA:3-ketoacid-CoA transferase (SCOT) functions as the first step in catabolism of ketone bodies that are formed by β-oxidation of fatty acids. A number of lines of evidence from profiling experiments point to increased use of fatty acids as an energy source by tumor cells, which presumably results in higher levels of ketone bodies within these cells. SCOT may be increased in tumor cells as a mechanism for metabolizing ketone bodies, which can be detrimental to cells at high concentrations.

[0426] Due to 10480 mRNA expression in the lung, along with its functional role, modulators of 10480 activity would be useful in treating human cancers, including but not limited to cancers of the lung. 10480 polypeptides of the present invention are useful in screening for modulators of 10480 activity.

[0427] Gene ID 20893

[0428] The human 20893 sequence (SEQ ID NO:81) known also as a serine/threonine-protein kinase, is approximately 6828 nucleotides long including untranslated regions. The coding sequence, located at about nucleic acids 1381 to 3366 of SEQ ID NO:81, encodes a 661 amino acid protein (SEQ ID NO:82).

[0429] As assessed by TaqMan analysis, 20893 mRNA was upregulated in lung tumors when compared to normal control tissues. Further TaqMan analysis indicated that 20893 mRNA expression increased in cell expressing activated kras. 20893 mRNA was also identified in immortalized bronchial epithelial cells transformed with mutant kras.

[0430] 20893 is an uncharacterized kinase that shows elevated expression in lung tumors and whose expression is increased by activation of the kras oncogene. Given the above expression characteristics, 20893, plays a potential role in cellular proliferation. Due to 20893 mRNA expression in lung tumors, along with its functional role, modulators of 20893 activity would be useful in treating human cancers, including but not limited to cancers of the lung. 20893 polypeptides of the present invention are useful in screening for modulators of 20893 activity.

[0431] Gene ID 33230

[0432] The human 33230 sequence (SEQ ID NO:83) known also as Acetyl CoA synthetase (ACS), is approximately 3608 nucleotides long including untranslated regions. The coding sequence, located at about nucleic acids 1 to 2070 of SEQ ID NO:83, encodes a 689 amino acid protein (SEQ ID NO:84).

[0433] As assessed by TaqMan analysis, 33230 mRNA was expressed in lung and colon tumors when compared to normal control tissues. Further TaqMan experiments in expanded lung and colon panels indicated that 33230 mRNA was expressed in non-small cell carcinomas.

[0434] 33230 or ACS catalyzes the activation of acetate, a reaction that is essential for lipid synthesis and energy generation. A pattern of regulation of 33230 by sterol regulatory element-binding proteins (SREBPs) resembles that of enzymes of fatty acid synthesis. Published literature indicates that 33230 expression is substantially elevated in tumor metastases in comparison to normal tissues. Therefore, selective inhibition of 33230 prevents metastatic growth of cancer cells. Due to 33230 mRNA expression in lung and colon tumors, along with its functional role, modulators of 33230 activity would be useful in treating human cancers, including but not limited to cancers of the lung and colon. 33230 polypeptides of the present invention are useful in screening for modulators of 33230 activity.

[0435] Gene ID 1586

[0436] The human 1586 sequence (SEQ ID NO:85), known also as PCTAIRE 2, is approximately 1738 nucleotides long including untranslated regions. The coding sequence, located at about nucleic acids 70 to 1641 of SEQ ID NO:85, encodes a 523 amino acid protein (SEQ ID NO:86).

[0437] As assessed by TaqMan analysis, 1586 mRNA was upregulated in lung tumors when compared to normal lung tissues. Further TaqMan analysis indicated that 1586 mRNA was also expressed in Beas-2B cells expressing mutant kras.

[0438] 1586 or PCTAIRE 2 is a member of a subfamily of Cdc2-related kinases. Cdc2-related kinases have been implicated in both cell cycle control (Charrasse S. et al. Cell Growth Differ 1999 September;10(9):611-20) and cellular differentiation (Hirose, T. et al. Eur J Biochem Oct. 15, 1997;249(2):481-8). The striking increase in 1586 expression levels in human tumors coupled with its upregulation by mutant kras in bronchial epithelial cell lines make it a potential player in lung tumor progression. Due to 1586 mRNA expression in the lung, along with its functional role, modulators of 1586 activity would be useful in treating human cancers including but not limited to cancers of the lung. 1586 polypeptides of the present invention are useful in screening for modulators of 1586 activity.

[0439] Gene ID 9943

[0440] The human 9943 sequence (SEQ ID NO:87), known also as a calcium/calmodulin-dependent protein kinase type II delta chain (CaMK-II), is approximately 1500 nucleotides long including untranslated regions. The coding sequence, located at about nucleic acids 1 to 1500 of SEQ ID NO:87, encodes a 499 amino acid protein (SEQ ID NO:88).

[0441] As assessed by TaqMan analysis, 9943 mRNA was upregulated in clinical lung tumors when compared to normal lung tissue. Further TaqMan analysis indicated that 9943 mRNA was upregulated in cells expressing an inducible form of active kras. 9943 mRNA was also downregulated by p53.

[0442] Calcium/calmodulin dependent kinases are major effectors of Ca²⁺ signaling pathways. The phenotypic effect of 9943 or CaMK-II signaling has been implicated in both cell cycle progression (Morris, T A. Exp Cell Res May 1, 1998;240(2):218-27) and cellular differentiation. Increased 9943 or CaMK-II activity in the context of a tumor cells enables ready transition through the GI checkpoint and increase cellular proliferation. Due to 9943 mRNA expression in lung tumors, along with its functional role, modulators of 9943 activity would be useful in treating human cancers, including but not limited to cancers of the lung. 9943 polypeptides of the present invention are useful in screening for modulators of 9943 activity.

[0443] Gene ID 16334

[0444] The human 16334 sequence (SEQ ID NO:89), known also as intestinal cell kinase, is approximately 6014 nucleotides long including untranslated regions. The coding sequence, located at about nucleic acids 267 to 2165 of SEQ ID NO:89, encodes a 632 amino acid protein (SEQ ID NO:90).

[0445] As assessed by TaqMan analysis, 16334 mRNA was upregulated in breast, lung and colon tumors. Further TaqMan analysis indicated that 16334 mRNA was upregulated in endothelial cell (EC) tube formation, endothelial culture, fetal and angiogenic tissues.

[0446] The expression patterns of 16334 indicate a role for 16334 in tumorigenesis and/or angiogenesis. Due to 16334 mRNA expression in breast, lung, and colon tumors, along with its functional role, modulators of 16334 activity would be useful in treating human cancers, including but not limited to cancers of the breast, lung, and colon. 16334 polypeptides of the present invention are useful in screening for modulators of 16334 activity.

[0447] Gene ID 68862

[0448] The human 68862 sequence (SEQ ID NO:91), known also as a pkinase, is approximately 2980 nucleotides long including untranslated regions. The coding sequence, located at about nucleic acids 86 to 2422 of SEQ ID NO:91, encodes a 778 amino acid protein (SEQ ID NO:92).

[0449] As assessed by TaqMan analysis, 68862 mRNA was upregulated in breast and lung tumors. Further TaqMan experiments indicate that 68862 mRNA was upregulated in fetal tissues and angiogenic tumors. As assessed by ISH, 68862 mRNA was upregulated in lung tumors as well as angiogenic tumors and fetal tissues.

[0450] The expression patterns of 68862 indicate a role of 68862 in tumorigenesis and/or angiogenesis. Due to 68862 mRNA expression in breast and lung tumors, along with its functional role, modulators of 68862 activity would be useful in treating human cancers, including but not limited to cancers of the breast and lung. 68862 polypeptides of the present invention are useful in screening for modulators of 68862 activity.

[0451] Gene ID 9011

[0452] The human 9011 sequence (SEQ ID NO:93) known also as an glycosylasparaginase, is approximately 1048 nucleotides long including untranslated regions. The coding sequence, located at about nucleic acids 4 to 1044 of SEQ ID NO:93, encodes a 346 amino acid protein (SEQ ID NO:94).

[0453] As assessed by TaqMan analysis, 9011 mRNA was expressed in lung and colon cancer samples when compared normal tissue samples. Further TaqMan analysis indicated that 9011 mRNA was also upregulated in liver and colon metastasis. 9011 mRNA was also downregulated by transient overexpression of p53 both mutant and wild-type p53 cell backgrounds.

[0454] Asparagine-linked oligosaccharides are required for tumor cell invasion and metastasis (Cancer Cells 1989, 1, 87-92; Cancer Surv 1988, 7, 573-95). Aspartylglycosaminuria is an autosomal recessive lysosomal storage disease caused by the defective degradation of asparagine-linked glycoproteins by glycosylasparaginase (Biochim Biophys Acta 1999, 1455, 139-54). Prolonged inhibition of lysosomal function results in apoptosis in neuroblastoma cells (Int J Cancer 2002, 97, 775-9). Tumor cells upregulate glycosylasparaginase in order to process the greater flux of asparagine-linked glycoproteins. Inhibition of glycosylasparaginase results in reduction of lysosomal function in tumor cells due to the accumulation of Asn-GlcNAc, resulting in apoptosis. Due to 9011 mRNA expression in lung and colon tumors, along with its functional role, modulators of 9011 activity would be useful in treating human cancers, including but not limited to cancers of the lung and colon. 9011 polypeptides of the present invention are useful in screening for modulators of 9011 activity.

[0455] Gene ID 14031

[0456] The human 14031 sequence (SEQ ID NO:95) known also as serine palmitoyltransferase 1, is approximately 1621 nucleotides long including untranslated regions. The coding sequence, located at about nucleic acids 1 to 1422 of SEQ ID NO:95, encodes a 473 amino acid protein (SEQ ID NO:96).

[0457] As assessed by TaqMan analysis, 14031 mRNA was expressed in lung, colon and liver metastases when compared with normal control tissues. Further TaqMan analysis on colon oncogenes and tumor suppressor panels indicated that 14031 mRNA expression decreased in response to transient expression of p53 in DLD1 and NCM425 cell lines.

[0458] TaqMan analysis on lung cell panels indicated that 14031 mRNA expression decreased in response to stable ERp53 expression, and decreasing even further with tamoxifen activation over 3 days. TaqMan experiments on xenograft friendly cell lines indicated that 14031 mRNA was expressed in all cancer cell lines tested, especially in DLD1 colon.

[0459] 14031 encodes serine palmitoyltransferase 1, the rate-limiting and committed step in de novo sphingolipid biosynthesis, including ceramide, sphingomyelins, and glycosphingolipids. Although several of the sphingolipids are growth inhibitory and induce apoptosis, several are known to be mitogenic and inhibit apoptosis, particularly the phosphosphingosines sphinganine 1-phosphate, ceramide 1-phosphate, and sphingosine 1-phosphate (J Biol Chem 2002 277, 25843-6; Biochemistry 2001 40, 4893-903). Transformed human fibroblasts have high levels of sphingomyelin synthase (SMS). High ceramide formation is fed into SMS, resulting in the formation of diacylglycerol (DAG) and activation of NF-kB (J Biol Chem 2000 275, 14760-6). Tumor cells upregulate 14031 to provide increased production of sphingolipids, which provide mitogenic and antiapoptotic signals. Therefore, inhibition of 14031 would interfere with these signals, reducing tumor growth and possibly promoting apoptosis. Due to 14031 mRNA expression in lung, colon and liver tumors, along with its functional role, modulators of 14031 activity would be useful in treating human cancers, including but not limited to cancers of the lung and colon. 14031 polypeptides of the present invention are useful in screening for modulators of 14031 activity.

[0460] Gene ID 6178

[0461] The human 6178 sequence (SEQ ID NO:97) known also as UDP-N-acetylhexosamine pyrophosphorylase (AGX) or UDPGlcNAc pyrophosphorylase (UAP), is approximately 2279 nucleotides long including untranslated regions. The coding sequence, located at about nucleic acids 233 to 1750 of SEQ ID NO:97, encodes a 505 amino acid protein (SEQ ID NO:98).

[0462] As assessed by TaqMan analysis, 6178 mRNA expression was upregulated in lung and breast tumor samples when compared normal control tissue samples. Further TaqMan analysis indicated that 6178 mRNA was upregulated upon induction of a mutant kras gene in Beas-2B cells.

[0463] 6178 or UDPGlcNAc pyrophosphorylase (UAP) catalyzes the production of UDPGlcNAc in the cell cytoplasm. UDPGlcNAc is a key precursor of glycosylphosphatidylinositol (GPI), and is required for the N- and O-linked glycosylations involved in the synthesis of cell surface glycoproteins. 6178 shows consistent increased expression in cells transformed with the kirsten ras oncogene, indicating that 6178 plays a role in tumorigenesis. Therefore, increasing 6178 expression potentially augments the differential expression of cell surface glycoproteins (ex. CD44, mucin, CEA) that is seen in many tumor types. In addition, differential glycosylation of cell surface proteins in tumors is implicated in invasion, metastasis, and evasion of immune response. Due to 6178 mRNA expression in lung and breast tumors, along with its functional role, modulators of 6178 activity would be useful in treating human cancers, including but not limited to cancers of the lung and breast. 6178 polypeptides of the present invention are useful in screening for modulators of 6178 activity.

[0464] Gene ID 21225

[0465] The human 21225 sequence (SEQ ID NO:99), a probable FAD synthetase, is approximately 1740 nucleotides long including untranslated regions. The coding sequence, located at about nucleic acids 177 to 1649 of SEQ ID NO:99, encodes a 490 amino acid protein (SEQ ID NO:100).

[0466] As assessed by TaqMan analysis, 21225 mRNA was upregulated in the breast, ovary, colon and lung tumors when compared with normal control tissues. Further TaqMan analysis indicated that 21225 mRNA was upregulated in human glioblastomas, angiogenic tumor islets in RIP-Tag mouse model and E10.5 mouse yolk sac. 21225 mRNA was also up-regulated in fetal tissues, angiogenic tumors, proliferating epithelial cells (EC) and matrigel EC tubes. In situ Hybridization experiments indicated that 21225 mRNA was expressed in angiogenic tissues and tumors.

[0467] 21225 mRNA encodes a probable FAD synthetase. FAD is a key cofactor is several survival and growth promoting pathways. Therefore, inhibiting 21225 will hamper FAD-dependent reactions, reducing tumor growth and increasing tumor apoptosis. Due to 21225 mRNA expression in breast, ovary, colon and lung tumors, angiogenic tissues, proliferating EC and EC tubes, along with its functional role, modulators of 21225 activity would be useful in treating human cancers, including but not limited to cancers of the breast, ovary, colon and lung. 21225 polypeptides of the present invention are useful in screening for modulators of 21225 activity.

[0468] Gene ID 1420

[0469] The human 1420 sequence (SEQ ID NO:101) known also as a Ephrin type-A receptor 1 precursor (EPHA1), is approximately 3370 nucleotides long including untranslated regions. The coding sequence, located at about nucleic acids 94 to 3048 of SEQ ID NO:101, encodes a 984 amino acid protein (SEQ ID NO:102).

[0470] As assessed by TaqMan analysis, 1420 mRNA was expressed in the ovary, lung and breast tumors (single sample pools of three tumors each), while respective normal tissues showed no 1420 mRNA expression. In addition, a single sample pool of three colon tumors each expressed the highest levels of 1420 mRNA, while normal colon expressed very low amounts of 1420 mRNA. A liver fibrosis sample also showed some expression of 1420 mRNA. Further TaqMan analysis on oncology tissue panels indicated that 1420 mRNA was expressed at increased levels in 2/5 breast tumors vs. 3/3 normal breast samples; 6/6 ovarian tumors vs. 3/3 normal ovary samples; 5/5 lung tumors vs. 4/4 normal lung samples; 3/4 colon tumors vs. 3/3 normal colon samples. TaqMan analysis on the ExBCa panel indicated that 1420 mRNA was expressed in all breast tumor samples, however two of the three normal breast samples on this panel also expressed equivalent levels of 1420 mRNA. TaqMan experiments completed on the ExCCa panel indicated that 1420 mRNA was expressed at an increased level in 5/12 colon tumors vs. 6/6 normal colon samples. In addition, 1420 mRNA was not uniformly expressed at an increased level in liver metastasis; 4/4 colon metastasis to liver had increased expression when compared to 3/6 normal liver samples. TaqMan experiments completed on the ExLCa panel indicated that 1420 mRNA was sporadically expressed in tumors (5/20 lung tumors) with infrequent overexpression when compared to normal lung tissues.

[0471] Eph-ephrin complexes control the directional movement of cells and neuronal growth cones and the establishment of the embryonic body plan. Eph receptor function is important in neurons, neural crest cells, and endothelial cells and angiogenesis. 1420 or Ephrin Al is induced in HUVECs by TNFa. 1420 or Ephrin Al does not cause endothelial cell proliferation but acts as chemoattractant for endothelial cells. Published literature indicates that overexpressing 1420 or EphA1 in NIH3T3 cells results in soft agar foci and tumor growth in nude mice.

[0472] Generally, overexpression of Eph receptors favor decreased cell adhesion, increased cell motility, and a higher degree of tissue invasiveness and metastasis. 1420 or EphA1 in particular is transforming and/or tumorigenic. Alternatively, secreted ephrins potentially function as diffusible chemoattractants for endothelial cells and tumor expressed Eph receptors potentially functions as contact-dependent organizing molecules to appropriately guide the incoming vessels. Due to 1420 mRNA expression in breast, ovary, colon and lung tumors, along with its functional role, modulators of 1420 activity would be useful in treating human cancers, including but not limited to cancers of the breast, ovary, colon and lung. 1420 polypeptides of the present invention are useful in screening for modulators of 1420 activity.

[0473] Gene ID 32236

[0474] The human 32236 sequence (SEQ ID NO:103) known also as long-chain acyl-CoA synthetase 6 (LACS6), is approximately 2555 nucleotides long including untranslated regions. The coding sequence, located at about nucleic acids 115 to 2208 of SEQ ID NO:103, encodes a 697 amino acid protein (SEQ ID NO:104).

[0475] As assessed by TaqMan analysis, 32236 mRNA was expressed in colon tumors (single sample pools of three tumors each), while respective normal tissues showed no 32236 mRNA expression. Brain and erythroid samples showed high expression of 32236 mRNA. Further TaqMan analysis on oncology tissue panels indicated that 32236 mRNA was expressed in 2/3 colon tumors while 3/3 normal colon samples showed no 32236 mRNA expression. TaqMan experiments completed on the ExCCa panel indicated that 32236 mRNA was expressed at an increased level in 7/12 primary colon tumors vs. 6/6 normal colon samples. In addition, 3/5 colon metastasis to liver had increased expression when compared to 5/5 normal liver samples, which had little or no expression. Further TaqMan experiments on the colon metastases to liver panel indicated that 32236 mRNA was expressed in 3/4 primary colon tumors and 9/16 colon metastases to liver with no expression normal colon and liver tissues. Furthermore, there was expression in 5/14 colon metastases to other tissues. Expression of 32236 mRNA is reduced in DLD1 cells with the transient expression of p53 or with a knocked out activated kras allele.

[0476] Due to 32236 mRNA expression in colon tumors, modulators of 32236 activity would be useful in treating human cancers, including but not limited to colon cancer. 32236 polypeptides of the present invention are useful in screening for modulators of 32236 activity.

[0477] Gene ID 2099

[0478] The human 2099 sequence (SEQ ID NO:105) known also as protein kinase C-like kinase 2 (PKL2), is approximately 3255 nucleotides long including untranslated regions. The coding sequence, located at about nucleic acids 10 to 2964 of SEQ ID NO:105, encodes a 984 amino acid protein (SEQ ID NO:106).

[0479] As assessed by TaqMan analysis, 2099 mRNA was expressed at a nine-fold greater level in colon tumors (single sample pools of three tumors each) vs. normal colon tissue pool. HUVEC cells, pituitary gland, brain and erythroid samples showed high expression of 2099 mRNA. Further TaqMan analysis on oncology tissue panels indicated that 2099 mRNA was expressed at greatly increased levels in 6/6 primary lung tumors vs. 3/3 normal lung samples. 2099 mRNA was also expressed at five-fold higher levels in proliferating HMVEC cells vs. arrested HMVECs. TaqMan experiments completed on the expanded lung cancer panel indicated that 2099 mRNA was expressed at an increased level in 7/11 moderately or poorly differentiated non-small cell lung carcinoma samples vs. 4/4 normal lung samples. In the lung cancer cell model panel, 2099 mRNA expression is reduced upon p53 expression and increased upon expression of activated kras. 2099 mRNA expression is reduced 3-fold in H460 cells with transiently expressed wild-type p53 at 24 hrs post infection. In H125 cells expressing a fusion protein of p53 with the hormone binding domain of the estrogen receptor, 4-hydroxytamoxifen induces activity of p53 and also reduced expression of 2099 mRNA. In the K10 clone of activated kras-transformed BEAS 2B cells, 2099 mRNA is expressed at slightly increased levels in comparison to the nontransformed, parental BEAS 2B lung cells. ISH analysis of 2099 mRNA shows similar expression patterns in lung and breast primary carcinomas as in the TaqMan results.

[0480] 2099 is an effector of Rho-family GTPases (Rho and Rac) and interacts with the adapter protein NCK. NCK binds EGFR, PDGFR, VEGFR and IRS-1 (SH2) and has been shown to induce cellular transformation. Therefore, NCK may couple receptor tyrosine kinase (RTK) activation with Rho family signaling through PKL2. Phosphoinositide-dependent kinase 1 (PDK1) phosphorylates and activates PKL2.

[0481] Due to 2099 function and expression, modulators of 2099 activity would mediate RTK growth, survival and/or motility signals and would inhibit tumor progression. Modulators of 2099 activity would be useful in treating human cancers, including but not limited to lung cancer. 2099 polypeptides of the present invention are useful in screening for modulators of 2099 activity.

[0482] Gene ID 2150

[0483] The human 2150 sequence (SEQ ID NO:107) known also pim-2 protooncogene (PIM2), is approximately 2088 nucleotides long including untranslated regions. The coding sequence, located at about nucleic acids 186 to 1190 of SEQ ID NO:107, encodes a 334 amino acid protein (SEQ ID NO:108).

[0484] As assessed by TaqMan analysis, 2150 mRNA was expressed at seven-fold increased levels in the primary colon tumor, primary lung tumor and primary breast tumor pools (single sample pools of three tumors each), vs. the normal colon, lung and breast tissues pools, respectively. Erythroid, tonsil and lymph node samples also showed high expression of 2150 mRNA. Further TaqMan analysis on oncology tissue panels indicated that 2150 mRNA was expressed at increased levels in 6/6 primary lung tumors vs. 2/3 normal lung samples. In TaqMan experiments completed on the colon cancer cell model panel, 2150 mRNA expression is reduced (9-17 fold) in variants of the parental HCT116 cell line that have the activated kras allele knocked out vs. HCT116 cells with an activated kras allele intact. e3HAMRAS9 cells with re-expressed activated kras have a 7-fold increase in 2150 mRNA expression vs. parental HKE3 cells with a knocked out activated kras allele. 2150 mRNA was also expressed in HK26 cells that have an intact kras allele.

[0485] Pim-2 expression correlates with activated kras expression in colon cancer cell lines. Experiments have shown that mouse pim-2 collaborates potently with c-myc, even when modestly overexpressed, to cause lymphomas.

[0486] Due to 2150 mRNA expression, modulators of 2150 activity would be useful in treating human cancers, including but not limited to lung and colon cancer. 2150 polypeptides of the present invention are useful in screening for modulators of 2150 activity.

[0487] Gene ID 26583

[0488] The human 26583 sequence (SEQ ID NO:109) known also as pyruvate dehydrogenase phosphate 1 (PDP1), is approximately 2838 nucleotides long including untranslated regions. The coding sequence, located at about nucleic acids 462 to 2075 of SEQ ID NO:109, encodes a 537 amino acid protein (SEQ ID NO:110).

[0489] As assessed by TaqMan analysis, 26583 mRNA was expressed at seven-fold increased levels in colon tumor pool (single sample pools of three tumors each) vs. the normal colon tissue pool. Brain, heart and skeletal muscle samples showed high expression of 26583 mRNA. Further TaqMan analysis on oncology tissue panels indicated that 26583 mRNA was expressed at higher levels in 2/5 primary breast tumors vs. 3/3 normal breast tissue samples, 2/6 primary ovarian tumors vs. 3/3 normal ovary tissue samples, 3/6 primary lung tumors vs. 3/3 normal lung tissue samples, and 3/4 primary colon tumors vs. 3/3 normal colon tissue samples. It is expressed at two-fold increased levels in proliferating HMVEC cells vs. arrested HMVECs. TaqMan experiments completed on the ExCCa panel indicated that 26583 mRNA was expressed at an increased level in 6/13 primary colon tumors vs. 4/6 normal colon tissue samples. In addition, 4/5 colon metastasis to liver had increased expression when compared to 6/6 normal liver tissue samples. Further TaqMan experiments on the colon metastases to liver panel indicated that 26583 mRNA was expressed in 11/16 colon metastases to liver vs. 3/3 normal liver tissue samples. In the panel of matched ovarian metastases to primary ovarian tumors, 26583 mRNA is expressed at increased levels in 6/7 pairs. TaqMan experiments on the oncology xenograft cell line panel indicated that 26583 mRNA is expressed in all tumor cell lines, with very high levels of expression in colon cancer cell lines, including DLD1, HCT116 and SW480. In the colon cancer cell model panel, 26583 mRNA expression is reduced in variants of the parental HCT116 cell that have the activated kras allele knocked out. In the breast cancer cell model panel, 26583 mRNA expression increases four-fold in the normal breast epithelial cell line, MCF10A, after 1 hr treatment with 10 ng.ml EGF.

[0490] 26583 is a mitochondrial enzyme associated with the pyruvate dehydrogenase complex (PDC). It is involved in the regulation of utilization of carbohydrate fuels, and catalyzes dephosphorylation and concomitant reactivation of the El component of the PDC. This activity is prominent in tissues with high energy demands, such as brain, skeletal muscle and heart. Acetyl-CoA is formed from pyruvate through oxidative decarboxylation by the multienzyme complex pyruvate dehydrogenase. The pyruvate dehydrogenase complex contains three catalytic activities (E1, E2 and E3). The pyruvate dehydrogenase complex regulates the entrance of acetyl units derived from carbohydrate sources into the citric acid cycle. The decarboxylation of pyruvate by El is irreversible and, since there are no other pathways in mammals for the synthesis of acetyl-CoA from pyruvate, it is crucial that the reaction be carefully controlled. Two regulatory systems are employed: 1) Product inhibition by NADH and acetyl Co-A and 2) Covalent modification by phosphorylation/dephosphorylation of the pyruvate dehydrogenase El subunit by pyruvate dehydrogenase kinase and pyruvate dehydrogenase phosphatase (26583). These enzymes are bound to the E2 core. The kinase phosphorylates and inactivates El; the phosphatase (26583) removes this phosphate, thus reactivating the complex.

[0491] The pyruvate dehydrogenase complex (PDC) regulates the use of glucose-linked substrates as sources of oxidative energy or as precursors in the biosynthesis of fatty acids. Activity of PDC is regulated by the competing activities of PDK and PDP reactions. Tissue-specific and metabolic state-specific control is achieved by the selective expression and distinct regulatory properties of at least four PDK isozymes and two PDP isozymes.

[0492] Elevated PDP1 activity in tumors will increase PDC production of acetyl-CoA and/or fatty acids, supporting increased tumor cell metabolism and proliferation. Due to 26583 mRNA function and expression, modulators of 26583 activity would affect tumor growth. Modulators of 26583 activity would be useful in treating human cancers, including but not limited to colon and ovarian cancer. 26583 polypeptides of the present invention are useful in screening for modulators of 26583 activity.

[0493] Gene ID 2784

[0494] The human 2784 sequence (SEQ ID NO:111), also known as placental leucine aminopeptidase (P-LAP) or leucyl-cystinyl aminopeptidase, is approximately 4053 nucleotides long including untranslated regions. The coding sequence, located at about nucleic acids 472 to 3549 of SEQ ID NO:111, encodes a 1025 amino acid protein (SEQ ID NO:112).

[0495] As assessed by TaqMan analysis, 2784 mRNA showed increased expression in 6/6 lung tumor samples vs. normal lung tissue. 2784 mRNA was expressed at increased levels in the primary colon tumor pool (single sample pool of three tumors each), vs. the normal colon pool. Further TaqMan analysis on oncology tissue panels indicated that 2784 mRNA was expressed at increased levels in 3/5 colon tumors vs. 2/3 normal colon samples. TaqMan experiments also indicated that 2784 mRNA is overexpressed in cells expressing mutant kras. In transcriptional profiling experiments, 2784 mRNA showed increased expression in Beas-2B cells that express mutated kras.

[0496] The predicted activity of 2784 is degradation of hormone peptides, particularly oxytocin and vasopressin. Vasopressin is thought to increase proliferation in small cell lung cancer. Increased 2784 expression may be required to maintain optimal peptide hormone homeostasis in lung tumor growth.

[0497] Due to 2784 mRNA expression and function, modulators of 2784 activity would be useful in treating human cancers, including but not limited to lung cancer. 2784 polypeptides of the present invention are useful in screening for modulators of 2784 activity.

[0498] Gene ID 8941

[0499] The human 8941 sequence (SEQ ID NO:113), also known as aldehyde reductase or alcohol dehydrogenase [NADP+], is approximately 1537 nucleotides long including untranslated regions. The coding sequence, located at about nucleic acids 446 to 1423 of SEQ ID NO:113, encodes a 325 amino acid protein (SEQ ID NO:114).

[0500] As assessed by TaqMan analysis, 8941 mRNA was expressed at higher levels in colon and lung tumor pools (single sample pool of 3 tumors) vs. normal colon and lung pools (single sample pool of 3 tissue samples). 8941 mRNA was also highly expressed in human umbilical vein endothelial cells (HUVEC). Further TaqMan analysis on oncology tissue panels indicated that 8941 mRNA was expressed at increased levels in 4/6 breast, 6/6 lung, and 2/5 colon tumors when compared to their respective normal tissue samples (3/3 breast, 3/3 lung, 3/3 colon). 8941 mRNA was expressed at increased levels in proliferating human microvascular endothelial cells (HMVEC) vs. arrested HMVECs. TaqMan analysis of the angiogenesis 1 panel (fetal vs. adult tissues) indicated that 8941 mRNA was expressed at increased levels in fetal kidney (2/2) and heart (1/1) vs. adult angiogenic tissue samples (35/35), including adult heart (7/7). TaqMan analysis of the angiogenesis 2 panel (hemangiomas and necrotic and angiogenic tumors) indicated that 8941 mRNA was expressed at higher levels in 6/8 hemangiomas vs. 1/1 normal skin tissue samples. 8941 was also expressed at higher levels in necrotic tumors (1/3 breast, 2/3 colon, and 3/4 lung tumors). In the expanded lung tumor panel, TaqMan analysis indicated that 8941 mRNA was increased in 16/33 lung tumors vs. 6/6 normal lung tissue samples or 27/33 lung tumors vs. 5/6 normal lung tissue samples.

[0501] Alkenyl aldehyde reductases are critical components of the oxidative stress response. Tumors substantially suppress the accumulation of lipid peroxidation byproducts to prevent apoptosis. Inhibition of alkenyl aldehyde reductases will result in accumulation of these lipid peroxidation byproducts, resulting in apoptosis in those cells dependent on its upregulated activity, in particular tumor cells.

[0502] Due to 8941 mRNA function and expression, modulators of 8941 activity would be useful in treating human cancers, including but not limited to lung cancer and tumor angiogenesis. 8941 polypeptides of the present invention are useful in screening for modulators of 8941 activity.

[0503] Gene ID 9811

[0504] The human 9811 sequence (SEQ ID NO:115) known also as guanylate cyclase soluble, beta-i chain (GCS-beta-1 or GUCY1B1), is approximately 2443 nucleotides long including untranslated regions. The coding sequence, located at about nucleic acids 89 to 1948 of SEQ ID NO:115, encodes a 619 amino acid protein (SEQ ID NO:116).

[0505] As assessed by TaqMan analysis, 9811 mRNA was highly expressed in central nervous system tissues, megakaryocytes and hemangioma (single sample pools of 3), with lower expression in cardiovascular tissues and substantially lower expression in other tissues, including breast, ovary, colon, and lung tumors. Further TaqMan analysis on oncology tissue panels indicated that 9811 mRNA was expressed at increased levels in 3/6 ovarian tumors and 6/6 lung tumors vs. their respective normal tissues (3/3 ovary and 2/2 lung samples), and was highly expressed in hemangioma. 9811 mRNA was also increased in proliferating HMVEC tissue culture vs. arrested HMVEC tissue culture. TaqMan analysis on angiogenesis I panel (fetal vs. adult tissues), indicated that expression of 9811 was higher in fetal kidney (2/2) and umbilical cord (2/2) vs. angiogenic adult tissues on the panel. TaqMan analysis on angiogenesis II panel (hemangiomas, necrotic and angiogenic tumor tissues) indicated higher expression of 9811 mRNA in 8/8 hemangioma tissues vs. 1/1 normal skin. There was higher expression in 1/4 breast, 3/3 colon, 2/4 ovary, and 3/3 lung tumors vs. their respective normal tissues (1/1 breast, 1/1 colon, 1/1 ovary, and 1/1 lung). In addition, 9811 mRNA was expressed at higher levels in 1/1 Wilm's tumor sample vs. 1/1 normal kidney sample. In the expanded lung tumor panel, TaqMan analysis indicated higher expression of 9811 mRNA in 7/7 non-small cell lung cancer (NSCLC) tumors and 1/1 small cell lung cancer (SCLC) tumors vs. 3/4 normal lung tissue samples. TaqMan experiments completed on in vitro endothelial cell proliferation, arrest, and tube formation (EC/PAT) panels indicated that 9811 mRNA was expressed at very low levels (19/19 samples) except in HMVEC tube formation supported on matrigel (3/3 samples) where it was much more highly expressed. TaqMan experiments completed on hemangiomas indicated that 9811 mRNA was expressed at very low levels in tissue culture (20/20 samples), but at much higher levels in clinical hemangioma tissue samples (3/3).

[0506] Tumor cells rely on nitric oxide (NO) signaling through soluble guanylate cyclase to promote proliferation, survival, angiogenesis, and migration. 9811 is a key mediator of NO signaling and shows restricted expression consistent with its involvement in angiogenesis.

[0507] Due to 9811 mRNA function and expression, modulators of 9811 activity would affect tumor growth. Modulators of 9811 activity would be useful in treating human cancers, including but not limited to tumor angiogenesis. 9811 polypeptides of the present invention are useful in screening for modulators of 9811 activity.

[0508] Gene ID 27444

[0509] The human 27444 sequence (SEQ ID NO:117) known also as guanylate cyclase soluble, beta-2 chain (GUCY1B2), is approximately 2749 nucleotides long including untranslated regions. The coding sequence, located at about nucleic acids 281 to 2134 of SEQ ID NO:117, encodes a 617 amino acid protein (SEQ ID NO:118).

[0510] As assessed by TaqMan analysis, 27444 mRNA is expressed at a 16-fold increased level in the primary breast tumor pool vs. the normal breast tissue pool and at a 7-fold increased level in the primary lung tumor pool vs. the normal lung tissue pool. In the oncology tissue panel, 27444 mRNA is not expressed in any normal tissue sample and is expressed in only 1/5 primary breast tumors, 2/6 primary ovary tumors, 1/6 primary lung tumors and 2/4 primary colon tumors. In further TaqMan analysis on the expanded lung cancer tissue panel, 27444 mRNA is expressed at increased levels (2-11 fold) in 7/20 primary lung tumor samples vs. 4/4 normal lung tumor samples. In the expanded breast cancer tissue panel, 27444 mRNA is not expressed in any normal tissue samples and is expressed at low levels in 1/4 invasive lobular carcinomas and 4/11 ductal carcinomas. In the expanded colon cancer tissue panel, 27444 mRNA showed no expression in 5/6 normal colon samples with little expression in the remaining sample. 27444 mRNA is expressed, at low levels, in 8/13 primary colon tumors and expressed in 3/3 colon metastases to liver, with higher expression levels in 2/3 liver metastases. Comparatively, 27444 mRNA is not expressed in 5/6 normal liver samples and is expressed at a low level in the remaining normal liver sample. TaqMan analysis on the angiogenesis 1 panel showed 27444 mRNA expression in uterine tumors, placenta and fetal kidney. In the angiogenesis 2 panel, 27444 mRNA showed expression in many highly angiogenic tumor types, including hemangiomas, endometrium tumors and hypoxic breast, colon, ovary and lung tumors. A Wilm's tumor sample showed 9-fold greater expression vs. a normal kidney sample. In the oncology xenograft cell line panel, 27444 mRNA is expressed in a subset of tumor cell lines, with significant expression in NCI-H69, MCF-7 and NCCCI-H322.

[0511] Tumor cells rely on nitric oxide signaling through soluble guanylate cyclase to promote proliferation, survival, angiogenesis, and migration. 27444 is a key mediator of nitric oxide signaling and shows restricted expression in a subset of tumors.

[0512] Due to 27444 mRNA function and expression, modulators of 27444 activity would modulate tumor growth, vascularization, and metastasis. Modulators of 27444 activity would be useful in treating human cancers, including but not limited to lung cancer. 27444 polypeptides of the present invention are useful in screening for modulators of 27444 activity.

[0513] Gene ID 50566

[0514] The human 50566 sequence (SEQ ID NO:119) is approximately 1154 nucleotides long including untranslated regions. The coding sequence, located at about nucleic acids 22 to 870 of SEQ ID NO:119, encodes a 282 amino acid protein (SEQ ID NO:120).

[0515] As assessed by TaqMan analysis, 50566 mRNA is expressed at a 9-fold increased level in the primary breast tumor pool vs. the normal breast tissue pool, at a 5-fold increased level in the primary ovary tumor pool vs. the normal ovary tissue pool, and at an 11-fold increased level in the primary colon tumor pool vs. the normal colon tissue pool. Brain and erythroid cell samples also showed high expression of 50566 mRNA. Further TaqMan analysis on oncology tissue panels indicated that 50566 mRNA was expressed at increased levels (3-9 fold) in 3/5 primary breast tumor samples vs. 3/3 normal breast tumor samples. 50566 mRNA is expressed at increased levels (3-48 fold) in 4/6 primary ovary tumor samples vs. 2/3 normal ovary tumor samples. 50566 mRNA is also expressed at increased levels (5-159 fold) in 4/4 primary colon tumor samples vs. 3/3 normal colon tumor sample. TaqMan analysis on the expanded breast cancer tissue panel showed 50566 mRNA is expressed at increased levels (2-61 fold) in 10/15 primary breast tumor samples vs. 3/4 normal breast tumor samples. In the expanded colon cancer tissue panel, 50566 mRNA is expressed at increased levels (2-43 fold) in 9/15 primary colon tumor samples vs. 6/6 normal colon tumor samples and is highly expressed in 4/4 colon metastases to the liver with little expression in 6/6 normal liver samples. In the expanded ovary cancer tissue panel, 50566 mRNA is expressed at increased levels (2-44 fold) in 8/17 primary ovary tumor samples vs. 5/5 normal ovary tumor samples. Further TaqMan analysis on the colon cancer cell model panel showed 50566 mRNA expression is reduced in HKH2 and HKE3 cells vs. HCT116 and HK26 cells (wild-type kras vs. activated kras). 50566 mRNA expression is also reduced in DLD1 cells with transiently expressed p53. In the oncology xenograft cell line panel, 50566 mRNA is expressed in all tumor cell lines, with very high expression in MCF-7 cells followed by ZR-75 and NCI-H69 cells. The ISH experiment confirmed the TaqMan data for colon and ovarian tumors.

[0516] 50566 is an unnamed human protein with 48% identity to hydroxyacylglutathione hydrolase (Glyoxalase II). 50566 may play a role as a detoxifying enzyme in tumors, perhaps in the glyoxalase system, by detoxifying cytotoxic methylglyoxal and modulating S-D-lactoylglutathione levels. Inhibition of 50566 is hypothesized to increase intracellular concentrations of the toxic methylglyoxal and/or the growth inhibitory intermediate S-D-lactoylglutathione, thereby inhibiting tumor growth.

[0517] Due to 50566 mRNA expression, modulators of 50566 activity would be useful in treating human cancers, including but not limited to ovarian and colon cancer. 50566 polypeptides of the present invention are useful in screening for modulators of 50566 activity.

[0518] Gene ID 66428

[0519] The human 66428 sequence (SEQ ID NO:121), a putative aldo-keto reductase, is approximately 1680 nucleotides long including untranslated regions. The coding sequence, located at about nucleic acids 101 to 1024 of SEQ ID NO:121, encodes a 307 amino acid protein (SEQ ID NO:122).

[0520] As assessed by TaqMan analysis, 66428 mRNA was expressed at increased levels in 1/1 ovary, 1/1 colon, and 1/1 lung tumor pools (single sample pools of 3 tumors each) vs. their respective normal tissue pools. Further TaqMan analysis on oncology tissue panels indicated that 66428 mRNA was expressed in 3/6 lung and 1/5 colon tumors vs. normal tissue samples (3/3 lung and 3/3 colon). TaqMan analysis on the angiogenesis 1 panel (fetal vs. adult tissues) indicated that 9/12 fetal tissues had higher 66428 mRNA expression vs. 31/35 adult tissues. In particular, 66428 mRNA levels were higher in fetal heart (1/1) relative to adult heart (7/7). TaqMan analysis on the angiogenesis 2 panel (hemangiomas and necrotic and angiogenic tumors) indicated that 66428 mRNA was elevated in hemangiomas (5/8) vs. normal skin tissue (1/1) and in necrotic tumors (3/4 breast, 3/3 colon, 2/4 ovary, and 2/3 lung) vs. normal tissues (1/1 breast, 1/1 colon, 1/1 ovary, and 1/1 lung) and in Wilm's tumor (1/1) vs. normal kidney (1/1). On the TaqMan panel evaluating in vitro endothelial cell proliferation, arrest and tube formation (EC/PAT), 66428 mRNA was expressed at increased levels in proliferating lung HMVEC (1/1) and HUVEC (2/2) samples vs. arrested lung HMVEC (1/1) and HUVEC (2/2) samples. Also, 66428 mRNA was elevated in lung HMVEC (5/6) and HUVEC (3/3) tube formation samples on matrigel vs. arrested lung HMVEC (1/1) and HUVEC (1/1) samples. TaqMan analysis of colon adenocarcinoma panel indicated that 66428 mRNA was increased in 7/13 colon adenocarcinomas vs. 5/6 normal colon tissue samples. In addition, 66428 mRNA was increased in 4/4 colon metastases to the liver vs. both normal liver (5/5) and normal colon (6/6). On the colon metastasis panel, TaqMan analysis indicated that 66428 mRNA was increased in 4/4 primary colon tumors vs. 3/3 normal colon tissue. In addition, 66428 mRNA was higher in 10/15 colon metastases vs. normal colon (3/3), normal liver (2/2) or primary colon tumors (4/4). In addition, 66428 mRNA levels were increased in 12/14 other sites of metastasis vs. normal colon (3/3) or primary colon tumors (4/4). The ISH experiment showed 66428 mRNA expression in primary colon tumors and metastatic colon carcinoma to the liver. In addition, selected angiogenic tissues were also positive.

[0521] Alkenyl aldehyde reductases are critical components of oxidative stress response. Tumors substantially suppress the accumulation of lipid peroxidation byproducts to prevent apoptosis. Inhibition of alkenyl aldehyde reductases will result in accumulation of these lipid peroxidation byproducts, resulting in apoptosis in those cells dependent on its upregulated activity, in particular tumor cells.

[0522] Due to 66428 mRNA expression, modulators of 66428 activity would be useful in treating human cancers, including but not limited to colon cancer. 66428 polypeptides of the present invention are useful in screening for modulators of 66428 activity.

[0523] Various aspects of the invention are described in further detail in the following subsections:

[0524] Screening Assays:

[0525] The invention provides a method (also referred to herein as a “screening assay”) for identifying modulators, i.e., candidate or test compounds or agents (e.g., peptides, peptidomimetics, small molecules (organic or inorganic) or other drugs) which bind to 140, 1470, 1686, 2089, 2427, 3702, 5891, 6428, 7181, 7660, 25641, 69583, 49863, 8897, 1682, 17667, 9235, 3703, 14171, 10359, 1660, 1450, 18894, 2088, 32427, 2160, 9252, 9389, 1642, 85269, 10297, 1584, 9525, 14124, 4469, 8990, 2100, 9288, 64698, 10480, 20893, 33230, 1586, 9943, 16334, 68862, 9011, 14031, 6178, 21225, 1420, 32236, 2099, 2150, 26583, 2784, 8941, 9811, 27444, 50566 or 66428 proteins, have a stimulatory or inhibitory effect on, for example, 140, 1470, 1686, 2089, 2427, 3702, 5891, 6428, 7181, 7660, 25641, 69583, 49863, 8897, 1682, 17667, 9235, 3703, 14171, 10359, 1660, 1450, 18894, 2088, 32427, 2160, 9252, 9389, 1642, 85269, 10297, 1584, 9525, 14124, 4469, 8990, 2100, 9288, 64698, 10480, 20893, 33230, 1586, 9943, 16334, 68862, 9011, 14031, 6178, 21225, 1420, 32236, 2099, 2150, 26583, 2784, 8941, 9811, 27444, 50566 or 66428 expression or 140, 1470, 1686, 2089, 2427, 3702, 5891, 6428, 7181, 7660, 25641, 69583, 49863, 8897, 1682, 17667, 9235, 3703, 14171, 10359, 1660, 1450, 18894, 2088, 32427, 2160, 9252, 9389, 1642, 85269, 10297, 1584, 9525, 14124, 4469, 8990, 2100, 9288, 64698, 10480, 20893, 33230, 1586, 9943, 16334, 68862, 9011, 14031, 6178, 21225, 1420, 32236, 2099, 2150, 26583, 2784, 8941, 9811, 27444, 50566 or 66428 activity, or have a stimulatory or inhibitory effect on, for example, the expression or activity of a 140, 1470, 1686, 2089, 2427, 3702, 5891, 6428, 7181, 7660, 25641, 69583, 49863, 8897, 1682, 17667, 9235, 3703, 14171, 10359, 1660, 1450, 18894, 2088, 32427, 2160, 9252, 9389, 1642, 85269, 10297, 1584, 9525, 14124, 4469, 8990, 2100, 9288, 64698, 10480, 20893, 33230, 1586, 9943, 16334, 68862, 9011, 14031, 6178, 21225, 1420, 32236, 2099, 2150, 26583, 2784, 8941, 9811, 27444, 50566 or 66428 substrate. Compounds identified using the assays described herein may be useful for treating a cancer.

[0526] These assays are designed to identify compounds that bind to a 140, 1470, 1686, 2089, 2427, 3702, 5891, 6428, 7181, 7660, 25641, 69583, 49863, 8897, 1682, 17667, 9235, 3703, 14171, 10359, 1660, 1450, 18894, 2088, 32427, 2160, 9252, 9389, 1642, 85269, 10297, 1584, 9525, 14124, 4469, 8990, 2100, 9288, 64698, 10480, 20893, 33230, 1586, 9943, 16334, 68862, 9011, 14031, 6178, 21225, 1420, 32236, 2099, 2150, 26583, 2784, 8941, 9811, 27444, 50566 or 66428 protein, bind to other intracellular or extracellular proteins that interact with a 140, 1470, 1686, 2089, 2427, 3702, 5891, 6428, 7181, 7660, 25641, 69583, 49863, 8897, 1682, 17667, 9235, 3703, 14171, 10359, 1660, 1450, 18894, 2088, 32427, 2160, 9252, 9389, 1642, 85269, 10297, 1584, 9525, 14124, 4469, 8990, 2100, 9288, 64698, 10480, 20893, 33230, 1586, 9943, 16334, 68862, 9011, 14031, 6178, 21225, 1420, 32236, 2099, 2150, 26583, 2784, 8941, 9811, 27444, 50566 or 66428 protein, and interfere with the interaction of the 140, 1470, 1686, 2089, 2427, 3702, 5891, 6428, 7181, 7660, 25641, 69583, 49863, 8897, 1682, 17667, 9235, 3703, 14171, 10359, 1660, 1450, 18894, 2088, 32427, 2160, 9252, 9389, 1642, 85269, 10297, 1584, 9525, 14124, 4469, 8990, 2100, 9288, 64698, 10480, 20893, 33230, 1586, 9943, 16334, 68862, 9011, 14031, 6178, 21225, 1420, 32236, 2099, 2150, 26583, 2784, 8941, 9811, 27444, 50566 or 66428 protein with other intercellular or extracellular proteins. For example, in the case of the 140, 1470, 1686, 2089, 2427, 3702, 5891, 6428, 7181, 7660, 25641, 69583, 49863, 8897, 1682, 17667, 9235, 3703, 14171, 10359, 1660, 1450, 18894, 2088, 32427, 2160, 9252, 9389, 1642, 85269, 10297, 1584, 9525, 14124, 4469, 8990, 2100, 9288, 64698, 10480, 20893, 33230, 1586, 9943, 16334, 68862, 9011, 14031, 6178, 21225, 1420, 32236, 2099, 2150, 26583, 2784, 8941, 9811, 27444, 50566 or 66428 protein, which is a transmembrane receptor-type protein, such techniques can identify ligands for such a receptor. A 140, 1470, 1686, 2089, 2427, 3702, 5891, 6428, 7181, 7660, 25641, 69583, 49863, 8897, 1682, 17667, 9235, 3703, 14171, 10359, 1660, 1450, 18894, 2088, 32427, 2160, 9252, 9389, 1642, 85269, 10297, 1584, 9525, 14124, 4469, 8990, 2100, 9288, 64698, 10480, 20893, 33230, 1586, 9943, 16334, 68862, 9011, 14031, 6178, 21225, 1420, 32236, 2099, 2150, 26583, 2784, 8941, 9811, 27444, 50566 or 66428 protein ligand or substrate can, for example, be used to ameliorate at least one symptom of a cancer. Such compounds may include, but are not limited small molecules, peptides, antibodies, ribozymes, gene therapy vectors and antisense oligonucleotides. Such compounds may also include other cellular proteins.

[0527] Compounds identified via assays such as those described herein may be useful, for example, for treating a cancer. In instances whereby a cancer condition results from an overall lower level of 140, 1470, 1686, 2089, 2427, 3702, 5891, 6428, 7181, 7660, 25641, 69583, 49863, 8897, 1682, 17667, 9235, 3703, 14171, 10359, 1660, 1450, 18894, 2088, 32427, 2160, 9252, 9389, 1642, 85269, 10297, 1584, 9525, 14124, 4469, 8990, 2100, 9288, 64698, 10480, 20893, 33230, 1586, 9943, 16334, 68862, 9011, 14031, 6178, 21225, 1420, 32236, 2099, 2150, 26583, 2784, 8941, 9811, 27444, 50566 or 66428 gene expression and/or 140, 1470, 1686, 2089, 2427, 3702, 5891, 6428, 7181, 7660, 25641, 69583, 49863, 8897, 1682, 17667, 9235, 3703, 14171, 10359, 1660, 1450, 18894, 2088, 32427, 2160, 9252, 9389, 1642, 85269, 10297, 1584, 9525, 14124, 4469, 8990, 2100, 9288, 64698, 10480, 20893, 33230, 1586, 9943, 16334, 68862, 9011, 14031, 6178, 21225, 1420, 32236, 2099, 2150, 26583, 2784, 8941, 9811, 27444, 50566 or 66428 protein in a cell or tissue, compounds that interact with the 140, 1470, 1686, 2089, 2427, 3702, 5891, 6428, 7181, 7660, 25641, 69583, 49863, 8897, 1682, 17667, 9235, 3703, 14171, 10359, 1660, 1450, 18894, 2088, 32427, 2160, 9252, 9389, 1642, 85269, 10297, 1584, 9525, 14124, 4469, 8990, 2100, 9288, 64698, 10480, 20893, 33230, 1586, 9943, 16334, 68862, 9011, 14031, 6178, 21225, 1420, 32236, 2099, 2150, 26583, 2784, 8941, 9811, 27444, 50566 or 66428 protein may include compounds which accentuate or amplify the activity of the bound 140, 1470, 1686, 2089, 2427, 3702, 5891, 6428, 7181, 7660, 25641, 69583, 49863, 8897, 1682, 17667, 9235, 3703, 14171, 10359, 1660, 1450, 18894, 2088, 32427, 2160, 9252, 9389, 1642, 85269, 10297, 1584, 9525, 14124, 4469, 8990, 2100, 9288, 64698, 10480, 20893, 33230, 1586, 9943, 16334, 68862, 9011, 14031, 6178, 21225, 1420, 32236, 2099, 2150, 26583, 2784, 8941, 9811, 27444, 50566 or 66428 protein. Such compounds would bring about an effective increase in the level of 140, 1470, 1686, 2089, 2427, 3702, 5891, 6428, 7181, 7660, 25641, 69583, 49863, 8897, 1682, 17667, 9235, 3703, 14171, 10359, 1660, 1450, 18894, 2088, 32427, 2160, 9252, 9389, 1642, 85269, 10297, 1584, 9525, 14124, 4469, 8990, 2100, 9288, 64698, 10480, 20893, 33230, 1586, 9943, 16334, 68862, 9011, 14031, 6178, 21225, 1420, 32236, 2099, 2150, 26583, 2784, 8941, 9811, 27444, 50566 or 66428 protein activity, thus ameliorating symptoms.

[0528] In other instances, mutations within the 140, 1470, 1686, 2089, 2427, 3702, 5891, 6428, 7181, 7660, 25641, 69583, 49863, 8897, 1682, 17667, 9235, 3703, 14171, 10359, 1660, 1450, 18894, 2088, 32427, 2160, 9252, 9389, 1642, 85269, 10297, 1584, 9525, 14124, 4469, 8990, 2100, 9288, 64698, 10480, 20893, 33230, 1586, 9943, 16334, 68862, 9011, 14031, 6178, 21225, 1420, 32236, 2099, 2150, 26583, 2784, 8941, 9811, 27444, 50566 or 66428 gene may cause aberrant types or excessive amounts of 140, 1470, 1686, 2089, 2427, 3702, 5891, 6428, 7181, 7660, 25641, 69583, 49863, 8897, 1682, 17667, 9235, 3703, 14171, 10359, 1660, 1450, 18894, 2088, 32427, 2160, 9252, 9389, 1642, 85269, 10297, 1584, 9525, 14124, 4469, 8990, 2100, 9288, 64698, 10480, 20893, 33230, 1586, 9943, 16334, 68862, 9011, 14031, 6178, 21225, 1420, 32236, 2099, 2150, 26583, 2784, 8941, 9811, 27444, 50566 or 66428 proteins to be made which have a deleterious effect that leads to a cancer. Similarly, physiological conditions may cause an excessive increase in 140, 1470, 1686, 2089, 2427, 3702, 5891, 6428, 7181, 7660, 25641, 69583, 49863, 8897, 1682, 17667, 9235, 3703, 14171, 10359, 1660, 1450, 18894, 2088, 32427, 2160, 9252, 9389, 1642, 85269, 10297, 1584, 9525, 14124, 4469, 8990, 2100, 9288, 64698, 10480, 20893, 33230, 1586, 9943, 16334, 68862, 9011, 14031, 6178, 21225, 1420, 32236, 2099, 2150, 26583, 2784, 8941, 9811, 27444, 50566 or 66428 gene expression leading to a cancer. In such cases, compounds that bind to a 140, 1470, 1686, 2089, 2427, 3702, 5891, 6428, 7181, 7660, 25641, 69583, 49863, 8897, 1682, 17667, 9235, 3703, 14171, 10359, 1660, 1450, 18894, 2088, 32427, 2160, 9252, 9389, 1642, 85269, 10297, 1584, 9525, 14124, 4469, 8990, 2100, 9288, 64698, 10480, 20893, 33230, 1586, 9943, 16334, 68862, 9011, 14031, 6178, 21225, 1420, 32236, 2099, 2150, 26583, 2784, 8941, 9811, 27444, 50566 or 66428 protein may be identified that inhibit the activity of the 140, 1470, 1686, 2089, 2427, 3702, 5891, 6428, 7181, 7660, 25641, 69583, 49863, 8897, 1682, 17667, 9235, 3703, 14171, 10359, 1660, 1450, 18894, 2088, 32427, 2160, 9252, 9389, 1642, 85269, 10297, 1584, 9525, 14124, 4469, 8990, 2100, 9288, 64698, 10480, 20893, 33230, 1586, 9943, 16334, 68862, 9011, 14031, 6178, 21225, 1420, 32236, 2099, 2150, 26583, 2784, 8941, 9811, 27444, 50566 or 66428 protein. Assays for testing the effectiveness of compounds identified by techniques such as those described in this section are discussed herein.

[0529] In one embodiment, the invention provides assays for screening candidate or test compounds which are substrates of a 140, 1470, 1686, 2089, 2427, 3702, 5891, 6428, 7181, 7660, 25641, 69583, 49863, 8897, 1682, 17667, 9235, 3703, 14171, 10359, 1660, 1450, 18894, 2088, 32427, 2160, 9252, 9389, 1642, 85269, 10297, 1584, 9525, 14124, 4469, 8990, 2100, 9288, 64698, 10480, 20893, 33230, 1586, 9943, 16334, 68862, 9011, 14031, 6178, 21225, 1420, 32236, 2099, 2150, 26583, 2784, 8941, 9811, 27444, 50566 or 66428 protein or polypeptide or biologically active portion thereof. In another embodiment, the invention provides assays for screening candidate or test compounds which bind to or modulate the activity of a 140, 1470, 1686, 2089, 2427, 3702, 5891, 6428, 7181, 7660, 25641, 69583, 49863, 8897, 1682, 17667, 9235, 3703, 14171, 10359, 1660, 1450, 18894, 2088, 32427, 2160, 9252, 9389, 1642, 85269, 10297, 1584, 9525, 14124, 4469, 8990, 2100, 9288, 64698, 10480, 20893, 33230, 1586, 9943, 16334, 68862, 9011, 14031, 6178, 21225, 1420, 32236, 2099, 2150, 26583, 2784, 8941, 9811, 27444, 50566 or 66428 protein or polypeptide or biologically active portion thereof. The test compounds of the present invention can be obtained using any of the numerous approaches in combinatorial library methods known in the art, including: biological libraries; spatially addressable parallel solid phase or solution phase libraries; synthetic library methods requiring deconvolution; the ‘one-bead one-compound’ library method; and synthetic library methods using affinity chromatography selection. The biological library approach is limited to peptide libraries, while the other four approaches are applicable to peptide, non-peptide oligomer or small molecule libraries of compounds (Lam, K. S. (1997) Anticancer Drug Des. 12:145).

[0530] Examples of methods for the synthesis of molecular libraries can be found in the art, for example in: DeWitt et al. (1993) Proc. Natl. Acad. Sci. U.S.A. 90:6909; Erb et al. (1994) Proc. Natl. Acad. Sci. USA 91:11422; Zuckermann et al. (1994). J. Med. Chem. 37:2678; Cho et al. (1993) Science 261:1303; Carrell et al. (1994) Angew. Chem. Int. Ed. Engl. 33:2059; Carell et al. (1994) Angew. Chem. Int. Ed. Engl. 33:2061; and in Gallop et al. (1994) J. Med. Chem. 37:1233.

[0531] Libraries of compounds may be presented in solution (e.g., Houghten (1992) Biotechniques 13:412-421), or on beads (Lam (1991) Nature 354:82-84), chips (Fodor (1993) Nature 364:555-556), bacteria (Ladner U.S. Pat. No. 5,223,409), spores (Ladner U.S. Pat. No. '409), plasmids (Cull et al. (1992) Proc Natl Acad Sci USA 89:1865-1869) or on phage (Scott and Smith (1990) Science 249:386-390); (Devlin (1990) Science 249:404-406); (Cwirla et al. (1990) Proc. Natl. Acad. Sci. 87:6378-6382); (Felici (1991) J. Mol. Biol. 222:301-310); (Ladner supra.).

[0532] In one embodiment, an assay is a cell-based assay in which a cell which expresses a 140, 1470, 1686, 2089, 2427, 3702, 5891, 6428, 7181, 7660, 25641, 69583, 49863, 8897, 1682, 17667, 9235, 3703, 14171, 10359, 1660, 1450, 18894, 2088, 32427, 2160, 9252, 9389, 1642, 85269, 10297, 1584, 9525, 14124, 4469, 8990, 2100, 9288, 64698, 10480, 20893, 33230, 1586, 9943, 16334, 68862, 9011, 14031, 6178, 21225, 1420, 32236, 2099, 2150, 26583, 2784, 8941, 9811, 27444, 50566 or 66428 protein or biologically active portion thereof is contacted with a test compound and the ability of the test compound to modulate 140, 1470, 1686, 2089, 2427, 3702, 5891, 6428, 7181, 7660, 25641, 69583, 49863, 8897, 1682, 17667, 9235, 3703, 14171, 10359, 1660, 1450, 18894, 2088, 32427, 2160, 9252, 9389, 1642, 85269, 10297, 1584, 9525, 14124, 4469, 8990, 2100, 9288, 64698, 10480, 20893, 33230, 1586, 9943, 16334, 68862, 9011, 14031, 6178, 21225, 1420, 32236, 2099, 2150, 26583, 2784, 8941, 9811, 27444, 50566 or 66428 activity is determined. Determining the ability of the test compound to modulate 140, 1470, 1686, 2089, 2427, 3702, 5891, 6428, 7181, 7660, 25641, 69583, 49863, 8897, 1682, 17667, 9235, 3703, 14171, 10359, 1660, 1450, 18894, 2088, 32427, 2160, 9252, 9389, 1642, 85269, 10297, 1584, 9525, 14124, 4469, 8990, 2100, 9288, 64698, 10480, 20893, 33230, 1586, 9943, 16334, 68862, 9011, 14031, 6178, 21225, 1420, 32236, 2099, 2150, 26583, 2784, 8941, 9811, 27444, 50566 or 66428 activity can be accomplished by monitoring, for example, intracellular calcium, IP₃, cAMP, or diacylglycerol concentration, the phosphorylation profile of intracellular proteins, cell proliferation and/or migration, gene expression of, for example, cell surface adhesion molecules or genes associated with cancer, or the activity of a 140, 1470, 1686, 2089, 2427, 3702, 5891, 6428, 7181, 7660, 25641, 69583, 49863, 8897, 1682, 17667, 9235, 3703, 14171, 10359, 1660, 1450, 18894, 2088, 32427, 2160, 9252, 9389, 1642, 85269, 10297, 1584, 9525, 14124, 4469, 8990, 2100, 9288, 64698, 10480, 20893, 33230, 1586, 9943, 16334, 68862, 9011, 14031, 6178, 21225, 1420, 32236, 2099, 2150, 26583, 2784, 8941, 9811, 27444, 50566 or 66428-regulated transcription factor. The cell can be of mammalian origin, e.g., a cancer cell. In one embodiment, compounds that interact with a receptor domain can be screened for their ability to function as ligands, i.e., to bind to the receptor and modulate a signal transduction pathway. Identification of ligands, and measuring the activity of the ligand-receptor complex, leads to the identification of modulators (e.g., antagonists) of this interaction. Such modulators may be useful in the treatment of a cancer.

[0533] The ability of the test compound to modulate 140, 1470, 1686, 2089, 2427, 3702, 5891, 6428, 7181, 7660, 25641, 69583, 49863, 8897, 1682, 17667, 9235, 3703, 14171, 10359, 1660, 1450, 18894, 2088, 32427, 2160, 9252, 9389, 1642, 85269, 10297, 1584, 9525, 14124, 4469, 8990, 2100, 9288, 64698, 10480, 20893, 33230, 1586, 9943, 16334, 68862, 9011, 14031, 6178, 21225, 1420, 32236, 2099, 2150, 26583, 2784, 8941, 9811, 27444, 50566 or 66428 binding to a substrate or to bind to 140, 1470, 1686, 2089, 2427, 3702, 5891, 6428, 7181, 7660, 25641, 69583, 49863, 8897, 1682, 17667, 9235, 3703, 14171, 10359, 1660, 1450, 18894, 2088, 32427, 2160, 9252, 9389, 1642, 85269, 10297, 1584, 9525, 14124, 4469, 8990, 2100, 9288, 64698, 10480, 20893, 33230, 1586, 9943, 16334, 68862, 9011, 14031, 6178, 21225, 1420, 32236, 2099, 2150, 26583, 2784, 8941, 9811, 27444, 50566 or 66428 can also be determined. Determining the ability of the test compound to modulate 140, 1470, 1686, 2089, 2427, 3702, 5891, 6428, 7181, 7660, 25641, 69583, 49863, 8897, 1682, 17667, 9235, 3703, 14171, 10359, 1660, 1450, 18894, 2088, 32427, 2160, 9252, 9389, 1642, 85269, 10297, 1584, 9525, 14124, 4469, 8990, 2100, 9288, 64698, 10480, 20893, 33230, 1586, 9943, 16334, 68862, 9011, 14031, 6178, 21225, 1420, 32236, 2099, 2150, 26583, 2784, 8941, 9811, 27444, 50566 or 66428 binding to a substrate can be accomplished, for example, by coupling the 140, 1470, 1686, 2089, 2427, 3702, 5891, 6428, 7181, 7660, 25641, 69583, 49863, 8897, 1682, 17667, 9235, 3703, 14171, 10359, 1660, 1450, 18894, 2088, 32427, 2160, 9252, 9389, 1642, 85269, 10297, 1584, 9525, 14124, 4469, 8990, 2100, 9288, 64698, 10480, 20893, 33230, 1586, 9943, 16334, 68862, 9011, 14031, 6178, 21225, 1420, 32236, 2099, 2150, 26583, 2784, 8941, 9811, 27444, 50566 or 66428 substrate with a radioisotope or enzymatic label such that binding of the 140, 1470, 1686, 2089, 2427, 3702, 5891, 6428, 7181, 7660, 25641, 69583, 49863, 8897, 1682, 17667, 9235, 3703, 14171, 10359, 1660, 1450, 18894, 2088, 32427, 2160, 9252, 9389, 1642, 85269, 10297, 1584, 9525, 14124, 4469, 8990, 2100, 9288, 64698, 10480, 20893, 33230, 1586, 9943, 16334, 68862, 9011, 14031, 6178, 21225, 1420, 32236, 2099, 2150, 26583, 2784, 8941, 9811, 27444, 50566 or 66428 substrate to 140, 1470, 1686, 2089, 2427, 3702, 5891, 6428, 7181, 7660, 25641, 69583, 49863, 8897, 1682, 17667, 9235, 3703, 14171, 10359, 1660, 1450, 18894, 2088, 32427, 2160, 9252, 9389, 1642, 85269, 10297, 1584, 9525, 14124, 4469, 8990, 2100, 9288, 64698, 10480, 20893, 33230, 1586, 9943, 16334, 68862, 9011, 14031, 6178, 21225, 1420, 32236, 2099, 2150, 26583, 2784, 8941, 9811, 27444, 50566 or 66428 can be determined by detecting the labeled 140, 1470, 1686, 2089, 2427, 3702, 5891, 6428, 7181, 7660, 25641, 69583, 49863, 8897, 1682, 17667, 9235, 3703, 14171, 10359, 1660, 1450, 18894, 2088, 32427, 2160, 9252, 9389, 1642, 85269, 10297, 1584, 9525, 14124, 4469, 8990, 2100, 9288, 64698, 10480, 20893, 33230, 1586, 9943, 16334, 68862, 9011, 14031, 6178, 21225, 1420, 32236, 2099, 2150, 26583, 2784, 8941, 9811, 27444, 50566 or 66428 substrate in a complex. 140, 1470, 1686, 2089, 2427, 3702, 5891, 6428, 7181, 7660, 25641, 69583, 49863, 8897, 1682, 17667, 9235, 3703, 14171, 10359, 1660, 1450, 18894, 2088, 32427, 2160, 9252, 9389, 1642, 85269, 10297, 1584, 9525, 14124, 4469, 8990, 2100, 9288, 64698, 10480, 20893, 33230, 1586, 9943, 16334, 68862, 9011, 14031, 6178, 21225, 1420, 32236, 2099, 2150, 26583, 2784, 8941, 9811, 27444, 50566 or 66428 could also be coupled with a radioisotope or enzymatic label to monitor the ability of a test compound to modulate 140, 1470, 1686, 2089, 2427, 3702, 5891, 6428, 7181, 7660, 25641, 69583, 49863, 8897, 1682, 17667, 9235, 3703, 14171, 10359, 1660, 1450, 18894, 2088, 32427, 2160, 9252, 9389, 1642, 85269, 10297, 1584, 9525, 14124, 4469, 8990, 2100, 9288, 64698, 10480, 20893, 33230, 1586, 9943, 16334, 68862, 9011, 14031, 6178, 21225, 1420, 32236, 2099, 2150, 26583, 2784, 8941, 9811, 27444, 50566 or 66428 binding to a 140, 1470, 1686, 2089, 2427, 3702, 5891, 6428, 7181, 7660, 25641, 69583, 49863, 8897, 1682, 17667, 9235, 3703, 14171, 10359, 1660, 1450, 18894, 2088, 32427, 2160, 9252, 9389, 1642, 85269, 10297, 1584, 9525, 14124, 4469, 8990, 2100, 9288, 64698, 10480, 20893, 33230, 1586, 9943, 16334, 68862, 9011, 14031, 6178, 21225, 1420, 32236, 2099, 2150, 26583, 2784, 8941, 9811, 27444, 50566 or 66428 substrate in a complex. Determining the ability of the test compound to bind 140, 1470, 1686, 2089, 2427, 3702, 5891, 6428, 7181, 7660, 25641, 69583, 49863, 8897, 1682, 17667, 9235, 3703, 14171, 10359, 1660, 1450, 18894, 2088, 32427, 2160, 9252, 9389, 1642, 85269, 10297, 1584, 9525, 14124, 4469, 8990, 2100, 9288, 64698, 10480, 20893, 33230, 1586, 9943, 16334, 68862, 9011, 14031, 6178, 21225, 1420, 32236, 2099, 2150, 26583, 2784, 8941, 9811, 27444, 50566 or 66428 can be accomplished, for example, by coupling the compound with a radioisotope or enzymatic label such that binding of the compound to 140, 1470, 1686, 2089, 2427, 3702, 5891, 6428, 7181, 7660, 25641, 69583, 49863, 8897, 1682, 17667, 9235, 3703, 14171, 10359, 1660, 1450, 18894, 2088, 32427, 2160, 9252, 9389, 1642, 85269, 10297, 1584, 9525, 14124, 4469, 8990, 2100, 9288, 64698, 10480, 20893, 33230, 1586, 9943, 16334, 68862, 9011, 14031, 6178, 21225, 1420, 32236, 2099, 2150, 26583, 2784, 8941, 9811, 27444, 50566 or 66428 can be determined by detecting the labeled 140, 1470, 1686, 2089, 2427, 3702, 5891, 6428, 7181, 7660, 25641, 69583, 49863, 8897, 1682, 17667, 9235, 3703, 14171, 10359, 1660, 1450, 18894, 2088, 32427, 2160, 9252, 9389, 1642, 85269, 10297, 1584, 9525, 14124, 4469, 8990, 2100, 9288, 64698, 10480, 20893, 33230, 1586, 9943, 16334, 68862, 9011, 14031, 6178, 21225, 1420, 32236, 2099, 2150, 26583, 2784, 8941, 9811, 27444, 50566 or 66428 compound in a complex. For example, compounds (e.g., 140, 1470, 1686, 2089, 2427, 3702, 5891, 6428, 7181, 7660, 25641, 69583, 49863, 8897, 1682, 17667, 9235, 3703, 14171, 10359, 1660, 1450, 18894, 2088, 32427, 2160, 9252, 9389, 1642, 85269, 10297, 1584, 9525, 14124, 4469, 8990, 2100, 9288, 64698, 10480, 20893, 33230, 1586, 9943, 16334, 68862, 9011, 14031, 6178, 21225, 1420, 32236, 2099, 2150, 26583, 2784, 8941, 9811, 27444, 50566 or 66428 ligands or substrates) can be labeled with ¹²⁵I, ³⁵S, ¹⁴C, or ³H, either directly or indirectly, and the radioisotope detected by direct counting of radioemmission or by scintillation counting. Compounds can further be enzymatically labeled with, for example, horseradish peroxidase, alkaline phosphatase, or luciferase, and the enzymatic label detected by determination of conversion of an appropriate substrate to product.

[0534] It is also within the scope of this invention to determine the ability of a compound (e.g., a 140, 1470, 1686, 2089, 2427, 3702, 5891, 6428, 7181, 7660, 25641, 69583, 49863, 8897, 1682, 17667, 9235, 3703, 14171, 10359, 1660, 1450, 18894, 2088, 32427, 2160, 9252, 9389, 1642, 85269, 10297, 1584, 9525, 14124, 4469, 8990, 2100, 9288, 64698, 10480, 20893, 33230, 1586, 9943, 16334, 68862, 9011, 14031, 6178, 21225, 1420, 32236, 2099, 2150, 26583, 2784, 8941, 9811, 27444, 50566 or 66428 ligand or substrate) to interact with 140, 1470, 1686, 2089, 2427, 3702, 5891, 6428, 7181, 7660, 25641, 69583, 49863, 8897, 1682, 17667, 9235, 3703, 14171, 10359, 1660, 1450, 18894, 2088, 32427, 2160, 9252, 9389, 1642, 85269, 10297, 1584, 9525, 14124, 4469, 8990, 2100, 9288, 64698, 10480, 20893, 33230, 1586, 9943, 16334, 68862, 9011, 14031, 6178, 21225, 1420, 32236, 2099, 2150, 26583, 2784, 8941, 9811, 27444, 50566 or 66428 without the labeling of any of the interactants. For example, a microphysiometer can be used to detect the interaction of a compound with 140, 1470, 1686, 2089, 2427, 3702, 5891, 6428, 7181, 7660, 25641, 69583, 49863, 8897, 1682, 17667, 9235, 3703, 14171, 10359, 1660, 1450, 18894, 2088, 32427, 2160, 9252, 9389, 1642, 85269, 10297, 1584, 9525, 14124, 4469, 8990, 2100, 9288, 64698, 10480, 20893, 33230, 1586, 9943, 16334, 68862, 9011, 14031, 6178, 21225, 1420, 32236, 2099, 2150, 26583, 2784, 8941, 9811, 27444, 50566 or 66428 without the labeling of either the compound or the 140, 1470, 1686, 2089, 2427, 3702, 5891, 6428, 7181, 7660, 25641, 69583, 49863, 8897, 1682, 17667, 9235, 3703, 14171, 10359, 1660, 1450, 18894, 2088, 32427, 2160, 9252, 9389, 1642, 85269, 10297, 1584, 9525, 14124, 4469, 8990, 2100, 9288, 64698, 10480, 20893, 33230, 1586, 9943, 16334, 68862, 9011, 14031, 6178, 21225, 1420, 32236, 2099, 2150, 26583, 2784, 8941, 9811, 27444, 50566 or 66428 (McConnell, H. M. et al. (1992) Science 257:1906-1912. As used herein, a “microphysiometer” (e.g., Cytosensor) is an analytical instrument that measures the rate at which a cell acidifies its environment using a light-addressable potentiometric sensor (LAPS). Changes in this acidification rate can be used as an indicator of the interaction between a compound and 140, 1470, 1686, 2089, 2427, 3702, 5891, 6428, 7181, 7660, 25641, 69583, 49863, 8897, 1682, 17667, 9235, 3703, 14171, 10359, 1660, 1450, 18894, 2088, 32427, 2160, 9252, 9389, 1642, 85269, 10297, 1584, 9525, 14124, 4469, 8990, 2100, 9288, 64698, 10480, 20893, 33230, 1586, 9943, 16334, 68862, 9011, 14031, 6178, 21225, 1420, 32236, 2099, 2150, 26583, 2784, 8941, 9811, 27444, 50566 or 66428.

[0535] In another embodiment, an assay is a cell-based assay comprising contacting a cell expressing a 140, 1470, 1686, 2089, 2427, 3702, 5891, 6428, 7181, 7660, 25641, 69583, 49863, 8897, 1682, 17667, 9235, 3703, 14171, 10359, 1660, 1450, 18894, 2088, 32427, 2160, 9252, 9389, 1642, 85269, 10297, 1584, 9525, 14124, 4469, 8990, 2100, 9288, 64698, 10480, 20893, 33230, 1586, 9943, 16334, 68862, 9011, 14031, 6178, 21225, 1420, 32236, 2099, 2150, 26583, 2784, 8941, 9811, 27444, 50566 or 66428 target molecule (e.g., a 140, 1470, 1686, 2089, 2427, 3702, 5891, 6428, 7181, 7660, 25641, 69583, 49863, 8897, 1682, 17667, 9235, 3703, 14171, 10359, 1660, 1450, 18894, 2088, 32427, 2160, 9252, 9389, 1642, 85269, 10297, 1584, 9525, 14124, 4469, 8990, 2100, 9288, 64698, 10480, 20893, 33230, 1586, 9943, 16334, 68862, 9011, 14031, 6178, 21225, 1420, 32236, 2099, 2150, 26583, 2784, 8941, 9811, 27444, 50566 or 66428 substrate) with a test compound and determining the ability of the test compound to modulate (e.g., stimulate or inhibit) the activity of the 140, 1470, 1686, 2089, 2427, 3702, 5891, 6428, 7181, 7660, 25641, 69583, 49863, 8897, 1682, 17667, 9235, 3703, 14171, 10359, 1660, 1450, 18894, 2088, 32427, 2160, 9252, 9389, 1642, 85269, 10297, 1584, 9525, 14124, 4469, 8990, 2100, 9288, 64698, 10480, 20893, 33230, 1586, 9943, 16334, 68862, 9011, 14031, 6178, 21225, 1420, 32236, 2099, 2150, 26583, 2784, 8941, 9811, 27444, 50566 or 66428 target molecule. Determining the ability of the test compound to modulate the activity of a 140, 1470, 1686, 2089, 2427, 3702, 5891, 6428, 7181, 7660, 25641, 69583, 49863, 8897, 1682, 17667, 9235, 3703, 14171, 10359, 1660, 1450, 18894, 2088, 32427, 2160, 9252, 9389, 1642, 85269, 10297, 1584, 9525, 14124, 4469, 8990, 2100, 9288, 64698, 10480, 20893, 33230, 1586, 9943, 16334, 68862, 9011, 14031, 6178, 21225, 1420, 32236, 2099, 2150, 26583, 2784, 8941, 9811, 27444, 50566 or 66428 target molecule can be accomplished, for example, by determining the ability of the 140, 1470, 1686, 2089, 2427, 3702, 5891, 6428, 7181, 7660, 25641, 69583, 49863, 8897, 1682, 17667, 9235, 3703, 14171, 10359, 1660, 1450, 18894, 2088, 32427, 2160, 9252, 9389, 1642, 85269, 10297, 1584, 9525, 14124, 4469, 8990, 2100, 9288, 64698, 10480, 20893, 33230, 1586, 9943, 16334, 68862, 9011, 14031, 6178, 21225, 1420, 32236, 2099, 2150, 26583, 2784, 8941, 9811, 27444, 50566 or 66428 protein to bind to or interact with the 140, 1470, 1686, 2089, 2427, 3702, 5891, 6428, 7181, 7660, 25641, 69583, 49863, 8897, 1682, 17667, 9235, 3703, 14171, 10359, 1660, 1450, 18894, 2088, 32427, 2160, 9252, 9389, 1642, 85269, 10297, 1584, 9525, 14124, 4469, 8990, 2100, 9288, 64698, 10480, 20893, 33230, 1586, 9943, 16334, 68862, 9011, 14031, 6178, 21225, 1420, 32236, 2099, 2150, 26583, 2784, 8941, 9811, 27444, 50566 or 66428 target molecule.

[0536] Determining the ability of the 140, 1470, 1686, 2089, 2427, 3702, 5891, 6428, 7181, 7660, 25641, 69583, 49863, 8897, 1682, 17667, 9235, 3703, 14171, 10359, 1660, 1450, 18894, 2088, 32427, 2160, 9252, 9389, 1642, 85269, 10297, 1584, 9525, 14124, 4469, 8990, 2100, 9288, 64698, 10480, 20893, 33230, 1586, 9943, 16334, 68862, 9011, 14031, 6178, 21225, 1420, 32236, 2099, 2150, 26583, 2784, 8941, 9811, 27444, 50566 or 66428 protein or a biologically active fragment thereof, to bind to or interact with a 140, 1470, 1686, 2089, 2427, 3702, 5891, 6428, 7181, 7660, 25641, 69583, 49863, 8897, 1682, 17667, 9235, 3703, 14171, 10359, 1660, 1450, 18894, 2088, 32427, 2160, 9252, 9389, 1642, 85269, 10297, 1584, 9525, 14124, 4469, 8990, 2100, 9288, 64698, 10480, 20893, 33230, 1586, 9943, 16334, 68862, 9011, 14031, 6178, 21225, 1420, 32236, 2099, 2150, 26583, 2784, 8941, 9811, 27444, 50566 or 66428 target molecule can be accomplished by one of the methods described above for determining direct binding. In a preferred embodiment, determining the ability of the 140, 1470, 1686, 2089, 2427, 3702, 5891, 6428, 7181, 7660, 25641, 69583, 49863, 8897, 1682, 17667, 9235, 3703, 14171, 10359, 1660, 1450, 18894, 2088, 32427, 2160, 9252, 9389, 1642, 85269, 10297, 1584, 9525, 14124, 4469, 8990, 2100, 9288, 64698, 10480, 20893, 33230, 1586, 9943, 16334, 68862, 9011, 14031, 6178, 21225, 1420, 32236, 2099, 2150, 26583, 2784, 8941, 9811, 27444, 50566 or 66428 protein to bind to or interact with a 140, 1470, 1686, 2089, 2427, 3702, 5891, 6428, 7181, 7660, 25641, 69583, 49863, 8897, 1682, 17667, 9235, 3703, 14171, 10359, 1660, 1450, 18894, 2088, 32427, 2160, 9252, 9389, 1642, 85269, 10297, 1584, 9525, 14124, 4469, 8990, 2100, 9288, 64698, 10480, 20893, 33230, 1586, 9943, 16334, 68862, 9011, 14031, 6178, 21225, 1420, 32236, 2099, 2150, 26583, 2784, 8941, 9811, 27444, 50566 or 66428 target molecule can be accomplished by determining the activity of the target molecule. For example, the activity of the target molecule can be determined by detecting induction of a cellular second messenger of the target (i.e., intracellular Ca²⁺, diacylglycerol, IP₃, cAMP), detecting catalytic/enzymatic activity of the target on an appropriate substrate, detecting the induction of a reporter gene (comprising a target-responsive regulatory element operatively linked to a nucleic acid encoding a detectable marker, e.g., luciferase), or detecting a target-regulated cellular response (e.g., gene expression).

[0537] In yet another embodiment, an assay of the present invention is a cell-free assay in which a 140, 1470, 1686, 2089, 2427, 3702, 5891, 6428, 7181, 7660, 25641, 69583, 49863, 8897, 1682, 17667, 9235, 3703, 14171, 10359, 1660, 1450, 18894, 2088, 32427, 2160, 9252, 9389, 1642, 85269, 10297, 1584, 9525, 14124, 4469, 8990, 2100, 9288, 64698, 10480, 20893, 33230, 1586, 9943, 16334, 68862, 9011, 14031, 6178, 21225, 1420, 32236, 2099, 2150, 26583, 2784, 8941, 9811, 27444, 50566 or 66428 protein or biologically active portion thereof, is contacted with a test compound and the ability of the test compound to bind to the 140, 1470, 1686, 2089, 2427, 3702, 5891, 6428, 7181, 7660, 25641, 69583, 49863, 8897, 1682, 17667, 9235, 3703, 14171, 10359, 1660, 1450, 18894, 2088, 32427, 2160, 9252, 9389, 1642, 85269, 10297, 1584, 9525, 14124, 4469, 8990, 2100, 9288, 64698, 10480, 20893, 33230, 1586, 9943, 16334, 68862, 9011, 14031, 6178, 21225, 1420, 32236, 2099, 2150, 26583, 2784, 8941, 9811, 27444, 50566 or 66428 protein or biologically active portion thereof is determined. Preferred biologically active portions of the 140, 1470, 1686, 2089, 2427, 3702, 5891, 6428, 7181, 7660, 25641, 69583, 49863, 8897, 1682, 17667, 9235, 3703, 14171, 10359, 1660, 1450, 18894, 2088, 32427, 2160, 9252, 9389, 1642, 85269, 10297, 1584, 9525, 14124, 4469, 8990, 2100, 9288, 64698, 10480, 20893, 33230, 1586, 9943, 16334, 68862, 9011, 14031, 6178, 21225, 1420, 32236, 2099, 2150, 26583, 2784, 8941, 9811, 27444, 50566 or 66428 proteins to be used in assays of the present invention include fragments which participate in interactions with non-140, 1470, 1686, 2089, 2427, 3702, 5891, 6428, 7181, 7660, 25641, 69583, 49863, 8897, 1682, 17667, 9235, 3703, 14171, 10359, 1660, 1450, 18894, 2088, 32427, 2160, 9252, 9389, 1642, 85269, 10297, 1584, 9525, 14124, 4469, 8990, 2100, 9288, 64698, 10480, 20893, 33230, 1586, 9943, 16334, 68862, 9011, 14031, 6178, 21225, 1420, 32236, 2099, 2150, 26583, 2784, 8941, 9811, 27444, 50566 or 66428 molecules, e.g., fragments with high surface probability scores. Binding of the test compound to the 140, 1470, 1686, 2089, 2427, 3702, 5891, 6428, 7181, 7660, 25641, 69583, 49863, 8897, 1682, 17667, 9235, 3703, 14171, 10359, 1660, 1450, 18894, 2088, 32427, 2160, 9252, 9389, 1642, 85269, 10297, 1584, 9525, 14124, 4469, 8990, 2100, 9288, 64698, 10480, 20893, 33230, 1586, 9943, 16334, 68862, 9011, 14031, 6178, 21225, 1420, 32236, 2099, 2150, 26583, 2784, 8941, 9811, 27444, 50566 or 66428 protein can be determined either directly or indirectly as described above. In a preferred embodiment, the assay includes contacting the 140, 1470, 1686, 2089, 2427, 3702, 5891, 6428, 7181, 7660, 25641, 69583, 49863, 8897, 1682, 17667, 9235, 3703, 14171, 10359, 1660, 1450, 18894, 2088, 32427, 2160, 9252, 9389, 1642, 85269, 10297, 1584, 9525, 14124, 4469, 8990, 2100, 9288, 64698, 10480, 20893, 33230, 1586, 9943, 16334, 68862, 9011, 14031, 6178, 21225, 1420, 32236, 2099, 2150, 26583, 2784, 8941, 9811, 27444, 50566 or 66428 protein or biologically active portion thereof with a known compound which binds 140, 1470, 1686, 2089, 2427, 3702, 5891, 6428, 7181, 7660, 25641, 69583, 49863, 8897, 1682, 17667, 9235, 3703, 14171, 10359, 1660, 1450, 18894, 2088, 32427, 2160, 9252, 9389, 1642, 85269, 10297, 1584, 9525, 14124, 4469, 8990, 2100, 9288, 64698, 10480, 20893, 33230, 1586, 9943, 16334, 68862, 9011, 14031, 6178, 21225, 1420, 32236, 2099, 2150, 26583, 2784, 8941, 9811, 27444, 50566 or 66428 to form an assay mixture, contacting the assay mixture with a test compound, and determining the ability of the test compound to interact with a 140, 1470, 1686, 2089, 2427, 3702, 5891, 6428, 7181, 7660, 25641, 69583, 49863, 8897, 1682, 17667, 9235, 3703, 14171, 10359, 1660, 1450, 18894, 2088, 32427, 2160, 9252, 9389, 1642, 85269, 10297, 1584, 9525, 14124, 4469, 8990, 2100, 9288, 64698, 10480, 20893, 33230, 1586, 9943, 16334, 68862, 9011, 14031, 6178, 21225, 1420, 32236, 2099, 2150, 26583, 2784, 8941, 9811, 27444, 50566 or 66428 protein, wherein determining the ability of the test compound to interact with a 140, 1470, 1686, 2089, 2427, 3702, 5891, 6428, 7181, 7660, 25641, 69583, 49863, 8897, 1682, 17667, 9235, 3703, 14171, 10359, 1660, 1450, 18894, 2088, 32427, 2160, 9252, 9389, 1642, 85269, 10297, 1584, 9525, 14124, 4469, 8990, 2100, 9288, 64698, 10480, 20893, 33230, 1586, 9943, 16334, 68862, 9011, 14031, 6178, 21225, 1420, 32236, 2099, 2150, 26583, 2784, 8941, 9811, 27444, 50566 or 66428 protein comprises determining the ability of the test compound to preferentially bind to 140, 1470, 1686, 2089, 2427, 3702, 5891, 6428, 7181, 7660, 25641, 69583, 49863, 8897, 1682, 17667, 9235, 3703, 14171, 10359, 1660, 1450, 18894, 2088, 32427, 2160, 9252, 9389, 1642, 85269, 10297, 1584, 9525, 14124, 4469, 8990, 2100, 9288, 64698, 10480, 20893, 33230, 1586, 9943, 16334, 68862, 9011, 14031, 6178, 21225, 1420, 32236, 2099, 2150, 26583, 2784, 8941, 9811, 27444, 50566 or 66428 or biologically active portion thereof as compared to the known compound. Compounds that modulate the interaction of 140, 1470, 1686, 2089, 2427, 3702, 5891, 6428, 7181, 7660, 25641, 69583, 49863, 8897, 1682, 17667, 9235, 3703, 14171, 10359, 1660, 1450, 18894, 2088, 32427, 2160, 9252, 9389, 1642, 85269, 10297, 1584, 9525, 14124, 4469, 8990, 2100, 9288, 64698, 10480, 20893, 33230, 1586, 9943, 16334, 68862, 9011, 14031, 6178, 21225, 1420, 32236, 2099, 2150, 26583, 2784, 8941, 9811, 27444, 50566 or 66428 with a known target protein may be useful in regulating the activity of a 140, 1470, 1686, 2089, 2427, 3702, 5891, 6428, 7181, 7660, 25641, 69583, 49863, 8897, 1682, 17667, 9235, 3703, 14171, 10359, 1660, 1450, 18894, 2088, 32427, 2160, 9252, 9389, 1642, 85269, 10297, 1584, 9525, 14124, 4469, 8990, 2100, 9288, 64698, 10480, 20893, 33230, 1586, 9943, 16334, 68862, 9011, 14031, 6178, 21225, 1420, 32236, 2099, 2150, 26583, 2784, 8941, 9811, 27444, 50566 or 66428 protein, especially a mutant 140, 1470, 1686, 2089, 2427, 3702, 5891, 6428, 7181, 7660, 25641, 69583, 49863, 8897, 1682, 17667, 9235, 3703, 14171, 10359, 1660, 1450, 18894, 2088, 32427, 2160, 9252, 9389, 1642, 85269, 10297, 1584, 9525, 14124, 4469, 8990, 2100, 9288, 64698, 10480, 20893, 33230, 1586, 9943, 16334, 68862, 9011, 14031, 6178, 21225, 1420, 32236, 2099, 2150, 26583, 2784, 8941, 9811, 27444, 50566 or 66428 protein.

[0538] In another embodiment, the assay is a cell-free assay in which a 140, 1470, 1686, 2089, 2427, 3702, 5891, 6428, 7181, 7660, 25641, 69583, 49863, 8897, 1682, 17667, 9235, 3703, 14171, 10359, 1660, 1450, 18894, 2088, 32427, 2160, 9252, 9389, 1642, 85269, 10297, 1584, 9525, 14124, 4469, 8990, 2100, 9288, 64698, 10480, 20893, 33230, 1586, 9943, 16334, 68862, 9011, 14031, 6178, 21225, 1420, 32236, 2099, 2150, 26583, 2784, 8941, 9811, 27444, 50566 or 66428 protein or biologically active portion thereof is contacted with a test compound and the ability of the test compound to modulate (e.g., stimulate or inhibit) the activity of the 140, 1470, 1686, 2089, 2427, 3702, 5891, 6428, 7181, 7660, 25641, 69583, 49863, 8897, 1682, 17667, 9235, 3703, 14171, 10359, 1660, 1450, 18894, 2088, 32427, 2160, 9252, 9389, 1642, 85269, 10297, 1584, 9525, 14124, 4469, 8990, 2100, 9288, 64698, 10480, 20893, 33230, 1586, 9943, 16334, 68862, 9011, 14031, 6178, 21225, 1420, 32236, 2099, 2150, 26583, 2784, 8941, 9811, 27444, 50566 or 66428 protein or biologically active portion thereof is determined. Determining the ability of the test compound to modulate the activity of a 140, 1470, 1686, 2089, 2427, 3702, 5891, 6428, 7181, 7660, 25641, 69583, 49863, 8897, 1682, 17667, 9235, 3703, 14171, 10359, 1660, 1450, 18894, 2088, 32427, 2160, 9252, 9389, 1642, 85269, 10297, 1584, 9525, 14124, 4469, 8990, 2100, 9288, 64698, 10480, 20893, 33230, 1586, 9943, 16334, 68862, 9011, 14031, 6178, 21225, 1420, 32236, 2099, 2150, 26583, 2784, 8941, 9811, 27444, 50566 or 66428 protein can be accomplished, for example, by determining the ability of the 140, 1470, 1686, 2089, 2427, 3702, 5891, 6428, 7181, 7660, 25641, 69583, 49863, 8897, 1682, 17667, 9235, 3703, 14171, 10359, 1660, 1450, 18894, 2088, 32427, 2160, 9252, 9389, 1642, 85269, 10297, 1584, 9525, 14124, 4469, 8990, 2100, 9288, 64698, 10480, 20893, 33230, 1586, 9943, 16334, 68862, 9011, 14031, 6178, 21225, 1420, 32236, 2099, 2150, 26583, 2784, 8941, 9811, 27444, 50566 or 66428 protein to bind to a 140, 1470, 1686, 2089, 2427, 3702, 5891, 6428, 7181, 7660, 25641, 69583, 49863, 8897, 1682, 17667, 9235, 3703, 14171, 10359, 1660, 1450, 18894, 2088, 32427, 2160, 9252, 9389, 1642, 85269, 10297, 1584, 9525, 14124, 4469, 8990, 2100, 9288, 64698, 10480, 20893, 33230, 1586, 9943, 16334, 68862, 9011, 14031, 6178, 21225, 1420, 32236, 2099, 2150, 26583, 2784, 8941, 9811, 27444, 50566 or 66428 target molecule by one of the methods described above for determining direct binding. Determining the ability of the 140, 1470, 1686, 2089, 2427, 3702, 5891, 6428, 7181, 7660, 25641, 69583, 49863, 8897, 1682, 17667, 9235, 3703, 14171, 10359, 1660, 1450, 18894, 2088, 32427, 2160, 9252, 9389, 1642, 85269, 10297, 1584, 9525, 14124, 4469, 8990, 2100, 9288, 64698, 10480, 20893, 33230, 1586, 9943, 16334, 68862, 9011, 14031, 6178, 21225, 1420, 32236, 2099, 2150, 26583, 2784, 8941, 9811, 27444, 50566 or 66428 protein to bind to a 140, 1470, 1686, 2089, 2427, 3702, 5891, 6428, 7181, 7660, 25641, 69583, 49863, 8897, 1682, 17667, 9235, 3703, 14171, 10359, 1660, 1450, 18894, 2088, 32427, 2160, 9252, 9389, 1642, 85269, 10297, 1584, 9525, 14124, 4469, 8990, 2100, 9288, 64698, 10480, 20893, 33230, 1586, 9943, 16334, 68862, 9011, 14031, 6178, 21225, 1420, 32236, 2099, 2150, 26583, 2784, 8941, 9811, 27444, 50566 or 66428 target molecule can also be accomplished using a technology such as real-time Biomolecular Interaction Analysis (BIA) (Sjolander, S. and Urbaniczky, C. (1991) Anal. Chem. 63:2338-2345 and Szabo et al. (1995) Curr. Opin. Struct. Biol. 5:699-705). As used herein, “BIA” is a technology for studying biospecific interactions in real time, without labeling any of the interactants (e.g., BIAcore). Changes in the optical phenomenon of surface plasmon resonance (SPR) can be used as an indication of real-time reactions between biological molecules.

[0539] In another embodiment, determining the ability of the test compound to modulate the activity of a 140, 1470, 1686, 2089, 2427, 3702, 5891, 6428, 7181, 7660, 25641, 69583, 49863, 8897, 1682, 17667, 9235, 3703, 14171, 10359, 1660, 1450, 18894, 2088, 32427, 2160, 9252, 9389, 1642, 85269, 10297, 1584, 9525, 14124, 4469, 8990, 2100, 9288, 64698, 10480, 20893, 33230, 1586, 9943, 16334, 68862, 9011, 14031, 6178, 21225, 1420, 32236, 2099, 2150, 26583, 2784, 8941, 9811, 27444, 50566 or 66428 protein can be accomplished by determining the ability of the 140, 1470, 1686, 2089, 2427, 3702, 5891, 6428, 7181, 7660, 25641, 69583, 49863, 8897, 1682, 17667, 9235, 3703, 14171, 10359, 1660, 1450, 18894, 2088, 32427, 2160, 9252, 9389, 1642, 85269, 10297, 1584, 9525, 14124, 4469, 8990, 2100, 9288, 64698, 10480, 20893, 33230, 1586, 9943, 16334, 68862, 9011, 14031, 6178, 21225, 1420, 32236, 2099, 2150, 26583, 2784, 8941, 9811, 27444, 50566 or 66428 protein to further modulate the activity of a downstream effector of a 140, 1470, 1686, 2089, 2427, 3702, 5891, 6428, 7181, 7660, 25641, 69583, 49863, 8897, 1682, 17667, 9235, 3703, 14171, 10359, 1660, 1450, 18894, 2088, 32427, 2160, 9252, 9389, 1642, 85269, 10297, 1584, 9525, 14124, 4469, 8990, 2100, 9288, 64698, 10480, 20893, 33230, 1586, 9943, 16334, 68862, 9011, 14031, 6178, 21225, 1420, 32236, 2099, 2150, 26583, 2784, 8941, 9811, 27444, 50566 or 66428 target molecule. For example, the activity of the effector molecule on an appropriate target can be determined or the binding of the effector to an appropriate target can be determined as previously described.

[0540] In yet another embodiment, the cell-free assay involves contacting a 140, 1470, 1686, 2089, 2427, 3702, 5891, 6428, 7181, 7660, 25641, 69583, 49863, 8897, 1682, 17667, 9235, 3703, 14171, 10359, 1660, 1450, 18894, 2088, 32427, 2160, 9252, 9389, 1642, 85269, 10297, 1584, 9525, 14124, 4469, 8990, 2100, 9288, 64698, 10480, 20893, 33230, 1586, 9943, 16334, 68862, 9011, 14031, 6178, 21225, 1420, 32236, 2099, 2150, 26583, 2784, 8941, 9811, 27444, 50566 or 66428 protein or biologically active portion thereof with a known compound which binds the 140, 1470, 1686, 2089, 2427, 3702, 5891, 6428, 7181, 7660, 25641, 69583, 49863, 8897, 1682, 17667, 9235, 3703, 14171, 10359, 1660, 1450, 18894, 2088, 32427, 2160, 9252, 9389, 1642, 85269, 10297, 1584, 9525, 14124, 4469, 8990, 2100, 9288, 64698, 10480, 20893, 33230, 1586, 9943, 16334, 68862, 9011, 14031, 6178, 21225, 1420, 32236, 2099, 2150, 26583, 2784, 8941, 9811, 27444, 50566 or 66428 protein to form an assay mixture, contacting the assay mixture with a test compound, and determining the ability of the test compound to interact with the 140, 1470, 1686, 2089, 2427, 3702, 5891, 6428, 7181, 7660, 25641, 69583, 49863, 8897, 1682, 17667, 9235, 3703, 14171, 10359, 1660, 1450, 18894, 2088, 32427, 2160, 9252, 9389, 1642, 85269, 10297, 1584, 9525, 14124, 4469, 8990, 2100, 9288, 64698, 10480, 20893, 33230, 1586, 9943, 16334, 68862, 9011, 14031, 6178, 21225, 1420, 32236, 2099, 2150, 26583, 2784, 8941, 9811, 27444, 50566 or 66428 protein, wherein determining the ability of the test compound to interact with the 140, 1470, 1686, 2089, 2427, 3702, 5891, 6428, 7181, 7660, 25641, 69583, 49863, 8897, 1682, 17667, 9235, 3703, 14171, 10359, 1660, 1450, 18894, 2088, 32427, 2160, 9252, 9389, 1642, 8526Q 10297, 1584, 9525, 14124, 4469, 8990, 2100, 9288, 64698, 10480, 20893, 33230, 1586, 9943, 16334, 68862, 9011, 14031, 6178, 21225, 1420, 32236, 2099, 2150, 26583, 2784, 8941, 9811, 27444, 50566 or 66428 protein comprises determining the ability of the 140, 1470, 1686, 2089, 2427, 3702, 5891, 6428, 7181, 7660, 25641, 69583, 49863, 8897, 1682, 17667, 9235, 3703, 14171, 10359, 1660, 1450, 18894, 2088, 32427, 2160, 9252, 9389, 1642, 85269, 10297, 1584, 9525, 14124, 4469, 8990, 2100, 9288, 64698, 10480, 20893, 33230, 1586, 9943, 16334, 68862, 9011, 14031, 6178, 21225, 1420, 32236, 2099, 2150, 26583, 2784, 8941, 9811, 27444, 50566 or 66428 protein to preferentially bind to or modulate the activity of a 140, 1470, 1686, 2089, 2427, 3702, 5891, 6428, 7181, 7660, 25641, 69583, 49863, 8897, 1682, 17667, 9235, 3703, 14171, 10359, 1660, 1450, 18894, 2088, 32427, 2160, 9252, 9389, 1642, 85269, 10297, 1584, 9525, 14124, 4469, 8990, 2100, 9288, 64698, 10480, 20893, 33230, 1586, 9943, 16334, 68862, 9011, 14031, 6178, 21225, 1420, 32236, 2099, 2150, 26583, 2784,-8941, 9811, 27444, 50566 or 66428 target molecule.

[0541] In more than one embodiment of the above assay methods of the present invention, it may be desirable to immobilize either 140, 1470, 1686, 2089, 2427, 3702, 5891, 6428, 7181, 7660, 25641, 69583, 49863, 8897, 1682, 17667, 9235, 3703, 14171, 10359, 1660, 1450, 18894, 2088, 32427, 2160, 9252, 9389, 1642, 85269, 10297, 1584, 9525, 14124, 4469, 8990, 2100, 9288, 64698, 10480, 20893, 33230, 1586, 9943, 16334, 68862, 9011, 14031, 6178, 21225, 1420, 32236, 2099, 2150, 26583, 2784, 8941, 9811, 27444, 50566 or 66428 or its target molecule to facilitate separation of complexed from uncomplexed forms of one or both of the proteins, as well as to accommodate automation of the assay. Binding of a test compound to a 140, 1470, 1686, 2089, 2427, 3702, 5891, 6428, 7181, 7660, 25641, 69583, 49863, 8897, 1682, 17667, 9235, 3703, 14171, 10359, 1660, 1450, 18894, 2088, 32427, 2160, 9252, 9389, 1642, 85269, 10297, 1584, 9525, 14124, 4469, 8990, 2100, 9288, 64698, 10480, 20893, 33230, 1586, 9943, 16334, 68862, 9011, 14031, 6178, 21225, 1420, 32236, 2099, 2150, 26583, 2784, 8941, 9811, 27444, 50566 or 66428 protein, or interaction of a 140, 1470, 1686, 2089, 2427, 3702, 5891, 6428, 7181, 7660, 25641, 69583, 49863, 8897, 1682, 17667, 9235, 3703, 14171, 10359, 1660, 1450, 18894, 2088, 32427, 2160, 9252, 9389, 1642, 85269, 10297, 1584, 9525, 14124, 4469, 8990, 2100, 9288, 64698, 10480, 20893, 33230, 1586, 9943, 16334, 68862, 9011, 14031, 6178, 21225, 1420, 32236, 2099, 2150, 26583, 2784, 8941, 9811, 27444, 50566 or 66428 protein with a target molecule in the presence and absence of a candidate compound, can be accomplished in any vessel suitable for containing the reactants. Examples of such vessels include microtitre plates, test tubes, and micro-centrifuge tubes. In one embodiment, a fusion protein can be provided which adds a domain that allows one or both of the proteins to be bound to a matrix. For example, glutathione-S-transferase/140, 1470, 1686, 2089, 2427, 3702, 5891, 6428, 7181, 7660, 25641, 69583, 49863, 8897, 1682, 17667, 9235, 3703, 14171, 10359, 1660, 1450, 18894, 2088, 32427, 2160, 9252, 9389, 1642, 85269, 10297, 1584, 9525, 14124, 4469, 8990, 2100, 9288, 64698, 10480, 20893, 33230, 1586, 9943, 16334, 68862, 9011, 14031, 6178, 21225, 1420, 32236, 2099, 2150, 26583, 2784, 8941, 9811, 27444, 50566 or 66428 fusion proteins or glutathione-S-transferase/target fusion proteins can be adsorbed onto glutathione sepharose beads (Sigma Chemical, St. Louis, Mo.) or glutathione derivatized microtitre plates, which are then combined with the test compound or the test compound and either the non-adsorbed target protein or 140, 1470, 1686, 2089, 2427, 3702, 5891, 6428, 7181, 7660, 25641, 69583, 49863, 8897, 1682, 17667, 9235, 3703, 14171, 10359, 1660, 1450, 18894, 2088, 32427, 2160, 9252, 9389, 1642, 85269, 10297, 1584, 9525, 14124, 4469, 8990, 2100, 9288, 64698, 10480, 20893, 33230, 1586, 9943, 16334, 68862, 9011, 14031, 6178, 21225, 1420, 32236, 2099, 2150, 26583, 2784, 8941, 9811, 27444, 50566 or 66428 protein, and the mixture incubated under conditions conducive to complex formation (e.g., at physiological conditions for salt and pH). Following incubation, the beads or microtitre plate wells are washed to remove any unbound components, the matrix immobilized in the case of beads, complex determined either directly or indirectly, for example, as described above. Alternatively, the complexes can be dissociated from the matrix, and the level of 140, 1470, 1686, 2089, 2427, 3702, 5891, 6428, 7181, 7660, 25641, 69583, 49863, 8897, 1682, 17667, 9235, 3703, 14171, 10359, 1660, 1450, 18894, 2088, 32427, 2160, 9252, 9389, 1642, 85269, 10297, 1584, 9525, 14124, 4469, 8990, 2100, 9288, 64698, 10480, 20893, 33230, 1586, 9943, 16334, 68862, 9011, 14031, 6178, 21225, 1420, 32236, 2099, 2150, 26583, 2784, 8941, 9811, 27444, 50566 or 66428 binding or activity determined using standard techniques.

[0542] Other techniques for immobilizing proteins on matrices can also be used in the screening assays of the invention. For example, either a 140, 1470, 1686, 2089, 2427, 3702, 5891, 6428, 7181, 7660, 25641, 69583, 49863, 8897, 1682, 17667, 9235, 3703, 14171, 10359, 1660, 1450, 18894, 2088, 32427, 2160, 9252, 9389, 1642, 85269, 10297, 1584, 9525, 14124, 4469, 8990, 2100, 9288, 64698, 10480, 20893, 33230, 1586, 9943, 16334, 68862, 9011, 14031, 6178, 21225, 1420, 32236, 2099, 2150, 26583, 2784, 8941, 9811, 27444, 50566 or 66428 protein or a 140, 1470, 1686, 2089, 2427, 3702, 5891, 6428, 7181, 7660, 25641, 69583, 49863, 8897, 1682, 17667, 9235, 3703, 14171, 10359, 1660, 1450, 18894, 2088, 32427, 2160, 9252, 9389, 1642, 85269, 10297, 1584, 9525, 14124, 4469, 8990, 2100, 9288, 64698, 10480, 20893, 33230, 1586, 9943, 16334, 68862, 9011, 14031, 6178, 21225, 1420, 32236, 2099, 2150, 26583, 2784, 8941, 9811, 27444, 50566 or 66428 target molecule can be immobilized utilizing conjugation of biotin and streptavidin. Biotinylated 140, 1470, 1686, 2089, 2427, 3702, 5891, 6428, 7181, 7660, 25641, 69583, 49863, 8897, 1682, 17667, 9235, 3703, 14171, 10359, 1660, 1450, 18894, 2088, 32427, 2160, 9252, 9389, 1642, 85269, 10297, 1584, 9525, 14124, 4469, 8990, 2100, 9288, 64698, 10480, 20893, 33230, 1586, 9943, 16334, 68862, 9011, 14031, 6178, 21225, 1420, 32236, 2099, 2150, 26583, 2784, 8941, 9811, 27444, 50566 or 66428 protein or target molecules can be prepared from biotin-NHS (N-hydroxy-succinimide) using techniques known in the art (e.g., biotinylation kit, Pierce Chemicals, Rockford, Ill.), and immobilized in the wells of streptavidin-coated 96 well plates (Pierce Chemical). Alternatively, antibodies reactive with 140, 1470, 1686, 2089, 2427, 3702, 5891, 6428, 7181, 7660, 25641, 69583, 49863, 8897, 1682, 17667, 9235, 3703, 14171, 10359, 1660, 1450, 18894, 2088, 32427, 2160, 9252, 9389, 1642, 85269, 10297, 1584, 9525, 14124, 4469, 8990, 2100, 9288, 64698, 10480, 20893, 33230, 1586, 9943, 16334, 68862, 9011, 14031, 6178, 21225, 1420, 32236, 2099, 2150, 26583, 2784, 8941, 9811, 27444, 50566 or 66428 protein or target molecules but which do not interfere with binding of the 140, 1470, 1686, 2089, 2427, 3702, 5891, 6428, 7181, 7660, 25641, 69583, 49863, 8897, 1682, 17667, 9235, 3703, 14171, 10359, 1660, 1450, 18894, 2088, 32427, 2160, 9252, 9389, 1642, 85269, 10297, 1584, 9525, 14124, 4469, 8990, 2100, 9288, 64698, 10480, 20893, 33230, 1586, 9943, 16334, 68862, 9011, 14031, 6178, 21225, 1420, 32236, 2099, 2150, 26583, 2784, 8941, 9811, 27444, 50566 or 66428 protein to its target molecule can be derivatized to the wells of the plate, and unbound target or 140, 1470, 1686, 2089, 2427, 3702, 5891, 6428, 7181, 7660, 25641, 69583, 49863, 8897, 1682, 17667, 9235, 3703, 14171, 10359, 1660, 1450, 18894, 2088, 32427, 2160, 9252, 9389, 1642, 85269, 10297, 1584, 9525, 14124, 4469, 8990, 2100, 9288, 64698, 10480, 20893, 33230, 1586, 9943, 16334, 68862, 9011, 14031, 6178, 21225, 1420, 32236, 2099, 2150, 26583, 2784, 8941, 9811, 27444, 50566 or 66428 protein trapped in the wells by antibody conjugation. Methods for detecting such complexes, in addition to those described above for the GST-immobilized complexes, include immunodetection of complexes using antibodies reactive with the 140, 1470, 1686, 2089, 2427, 3702, 5891, 6428, 7181, 7660, 25641, 69583, 49863, 8897, 1682, 17667, 9235, 3703, 14171, 10359, 1660, 1450, 18894, 2088, 32427, 2160, 9252, 9389, 1642, 85269, 10297, 1584, 9525, 14124, 4469, 8990, 2100, 9288, 64698, 10480, 20893, 33230, 1586, 9943, 16334, 68862, 9011, 14031, 6178, 21225, 1420, 32236, 2099, 2150, 26583, 2784, 8941, 9811, 27444, 50566 or 66428 protein or target molecule, as well as enzyme-linked assays which rely on detecting an enzymatic activity associated with the 140, 1470, 1686, 2089, 2427, 3702, 5891, 6428, 7181, 7660, 25641, 69583, 49863, 8897, 1682, 17667, 9235, 3703, 14171, 10359, 1660, 1450, 18894, 2088, 32427, 2160, 9252, 9389, 1642, 85269, 10297, 1584, 9525, 14124, 4469, 8990, 2100, 9288, 64698, 10480, 20893, 33230, 1586, 9943, 16334, 68862, 9011, 14031, 6178, 21225, 1420, 32236, 2099, 2150, 26583, 2784, 8941, 9811, 27444, 50566 or 66428 protein or target molecule.

[0543] In another embodiment, modulators of 140, 1470, 1686, 2089, 2427, 3702, 5891, 6428, 7181, 7660, 25641, 69583, 49863, 8897, 1682, 17667, 9235, 3703, 14171, 10359, 1660, 1450, 18894, 2088, 32427, 2160, 9252, 9389, 1642, 85269, 10297, 1584, 9525, 14124, 4469, 8990, 2100, 9288, 64698, 10480, 20893, 33230, 1586, 9943, 16334, 68862, 9011, 14031, 6178, 21225, 1420, 32236, 2099, 2150, 26583, 2784, 8941, 9811, 27444, 50566 or 66428 expression are identified in a method wherein a cell is contacted with a candidate compound and the expression of 140, 1470, 1686, 2089, 2427, 3702, 5891, 6428, 7181, 7660, 25641, 69583, 49863, 8897, 1682, 17667, 9235, 3703, 14171, 10359, 1660, 1450, 18894, 2088, 32427, 2160, 9252, 9389, 1642, 85269, 10297, 1584, 9525, 14124, 4469, 8990, 2100, 9288, 64698, 10480, 20893, 33230, 1586, 9943, 16334, 68862, 9011, 14031, 6178, 21225, 1420, 32236, 2099, 2150, 26583, 2784, 8941, 9811, 27444, 50566 or 66428 mRNA or protein in the cell is determined. The level of expression of 140, 1470, 1686, 2089, 2427, 3702, 5891, 6428, 7181, 7660, 25641, 69583, 49863, 8897, 1682, 17667, 9235, 3703, 14171, 10359, 1660, 1450, 18894, 2088, 32427, 2160, 9252, 9389, 1642, 85269, 10297, 1584, 9525, 14124, 4469, 8990, 2100, 9288, 64698, 10480, 20893, 33230, 1586, 9943, 16334, 68862, 9011, 14031, 6178, 21225, 1420, 32236, 2099, 2150, 26583, 2784, 8941, 9811, 27444, 50566 or 66428 mRNA or protein in the presence of the candidate compound is compared to the level of expression of 140, 1470, 1686, 2089, 2427, 3702, 5891, 6428, 7181, 7660, 25641, 69583, 49863, 8897, 1682, 17667, 9235, 3703, 14171, 10359, 1660, 1450, 18894, 2088, 32427, 2160, 9252, 9389, 1642, 85269, 10297, 1584, 9525, 14124, 4469, 8990, 2100, 9288, 64698, 10480, 20893, 33230, 1586, 9943, 16334, 68862, 9011, 14031, 6178, 21225, 1420, 32236, 2099, 2150, 26583, 2784, 8941, 9811, 27444, 50566 or 66428 mRNA or protein in the absence of the candidate compound. The candidate compound can then be identified as a modulator of 140, 1470, 1686, 2089, 2427, 3702, 5891, 6428, 7181, 7660, 25641, 69583, 49863, 8897, 1682, 17667, 9235, 3703, 14171, 10359, 1660, 1450, 18894, 2088, 32427, 2160, 9252, 9389, 1642, 85269, 10297, 1584, 9525, 14124, 4469, 8990, 2100, 9288, 64698, 10480, 20893, 33230, 1586, 9943, 16334, 68862, 9011, 14031, 6178, 21225, 1420, 32236, 2099, 2150, 26583, 2784, 8941, 9811, 27444, 50566 or 66428 expression based on this comparison. For example, when expression of 140, 1470, 1686, 2089, 2427, 3702, 5891, 6428, 7181, 7660, 25641, 69583, 49863, 8897, 1682, 17667, 9235, 3703, 14171, 10359, 1660, 1450, 18894, 2088, 32427, 2160, 9252, 9389, 1642, 85269, 10297, 1584, 9525, 14124, 4469, 8990, 2100, 9288, 64698, 10480, 20893, 33230, 1586, 9943, 16334, 68862, 9011, 14031, 6178, 21225, 1420, 32236, 2099, 2150, 26583, 2784, 8941, 9811, 27444, 50566 or 66428 mRNA or protein is greater (statistically significantly greater) in the presence of the candidate compound than in its absence, the candidate compound is identified as a stimulator of 140, 1470, 1686, 2089, 2427, 3702, 5891, 6428, 7181, 7660, 25641, 69583, 49863, 8897, 1682, 17667, 9235, 3703, 14171, 10359, 1660, 1450, 18894, 2088, 32427, 2160, 9252, 9389, 1642, 85269, 10297, 1584, 9525, 14124, 4469, 8990, 2100, 9288, 64698, 10480, 20893, 33230, 1586, 9943, 16334, 68862, 9011, 14031, 6178, 21225, 1420, 32236, 2099, 2150, 26583, 2784, 8941, 9811, 27444, 50566 or 66428 mRNA or protein expression. Alternatively, when expression of 140, 1470, 1686, 2089, 2427, 3702, 5891, 6428, 7181, 7660, 25641, 69583, 49863, 8897, 1682, 17667, 9235, 3703, 14171, 10359, 1660, 1450, 18894, 2088, 32427, 2160, 9252, 9389, 1642, 85269, 10297, 1584, 9525, 14124, 4469, 8990, 2100, 9288, 64698, 10480, 20893, 33230, 1586, 9943, 16334, 68862, 9011, 14031, 6178, 21225, 1420, 32236, 2099, 2150, 26583, 2784, 8941, 9811, 27444, 50566 or 66428 mRNA or protein is less (statistically significantly less) in the presence of the candidate compound than in its absence, the candidate compound is identified as an inhibitor of 140, 1470, 1686, 2089, 2427, 3702, 5891, 6428, 7181, 7660, 25641, 69583, 49863, 8897, 1682, 17667, 9235, 3703, 14171, 10359, 1660, 1450, 18894, 2088, 32427, 2160, 9252, 9389, 1642, 85269, 10297, 1584, 9525, 14124, 4469, 8990, 2100, 9288, 64698, 10480, 20893, 33230, 1586, 9943, 16334, 68862, 9011, 14031, 6178, 21225, 1420, 32236, 2099, 2150, 26583, 2784, 8941, 9811, 27444, 50566 or 66428 mRNA or protein expression. The level of 140, 1470, 1686, 2089, 2427, 3702, 5891, 6428, 7181, 7660, 25641, 69583, 49863, 8897, 1682, 17667, 9235, 3703, 14171, 10359, 1660, 1450, 18894, 2088, 32427, 2160, 9252, 9389, 1642, 85269, 10297, 1584, 9525, 14124, 4469, 8990, 2100, 9288, 64698, 10480, 20893, 33230, 1586, 9943, 16334, 68862, 9011, 14031, 6178, 21225, 1420, 32236, 2099, 2150, 26583, 2784, 8941, 9811, 27444, 50566 or 66428 mRNA or protein expression in the cells can be determined by methods described herein for detecting 140, 1470, 1686, 2089, 2427, 3702, 5891, 6428, 7181, 7660, 25641, 69583, 49863, 8897, 1682, 17667, 9235, 3703, 14171, 10359, 1660, 1450, 18894, 2088, 32427, 2160, 9252, 9389, 1642, 85269, 10297, 1584, 9525, 14124, 4469, 8990, 2100, 9288, 64698, 10480, 20893, 33230, 1586, 9943, 16334, 68862, 9011, 14031, 6178, 21225, 1420, 32236, 2099, 2150, 26583, 2784, 8941, 9811, 27444, 50566 or 66428 mRNA or protein.

[0544] In yet another aspect of the invention, the 140, 1470, 1686, 2089, 2427, 3702, 5891, 6428, 7181, 7660, 25641, 69583, 49863, 8897, 1682, 17667, 9235, 3703, 14171, 10359, 1660, 1450, 18894, 2088, 32427, 2160, 9252, 9389, 1642, 85269, 10297, 1584, 9525, 14124, 4469, 8990, 2100, 9288, 64698, 10480, 20893, 33230, 1586, 9943, 16334, 68862, 9011, 14031, 6178, 21225, 1420, 32236, 2099, 2150, 26583, 2784, 8941, 9811, 27444, 50566 or 66428 proteins can be used as “bait proteins” in a two-hybrid assay or three-hybrid assay (see, e.g., U.S. Pat. No. 5,283,317; Zervos et al. (1993) Cell 72:223-232; Madura et al. (1993) J. Biol. Chem. 268:12046-12054; Bartel et al. (1993) Biotechniques 14:920-924; Iwabuchi et al. (1993) Oncogene 8:1693-1696; and Brent WO94/10300), to identify other proteins, which bind to or interact with 140, 1470, 1686, 2089, 2427, 3702, 5891, 6428, 7181, 7660, 25641, 69583, 49863, 8897, 1682, 17667, 9235, 3703, 14171, 10359, 1660, 1450, 18894, 2088, 32427, 2160, 9252, 9389, 1642, 85269, 10297, 1584, 9525, 14124, 4469, 8990, 2100, 9288, 64698, 10480, 20893, 33230, 1586, 9943, 16334, 68862, 9011, 14031, 6178, 21225, 1420, 32236, 2099, 2150, 26583, 2784, 8941, 9811, 27444, 50566 or 66428 (“140, 1470, 1686, 2089, 2427, 3702, 5891, 6428, 7181, 7660, 25641, 69583, 49863, 8897, 1682, 17667, 9235, 3703, 14171, 10359, 1660, 1450, 18894, 2088, 32427, 2160, 9252, 9389, 1642, 85269, 10297, 1584, 9525, 14124, 4469, 8990, 2100, 9288, 64698, 10480, 20893, 33230, 1586, 9943, 16334, 68862, 9011, 14031, 6178, 21225, 1420, 32236, 2099, 2150, 26583, 2784, 8941, 9811, 27444, 50566 or 66428-binding proteins” or “140, 1470, 1686, 2089, 2427, 3702, 5891, 6428, 7181, 7660, 25641, 69583, 49863, 8897, 1682, 17667, 9235, 3703, 14171, 10359, 1660, 1450, 18894, 2088, 32427, 2160, 9252, 9389, 1642, 85269, 10297, 1584, 9525, 14124, 4469, 8990, 2100, 9288, 64698, 10480, 20893, 33230, 1586, 9943, 16334, 68862, 9011, 14031, 6178, 21225, 1420, 32236, 2099, 2150, 26583, 2784, 8941, 9811, 27444, 50566 or 66428-bp”) and are involved in 140, 1470, 1686, 2089, 2427, 3702, 5891, 6428, 7181, 7660, 25641, 69583, 49863, 8897, 1682, 17667, 9235, 3703, 14171, 10359, 1660, 1450, 18894, 2088, 32427, 2160, 9252, 9389, 1642, 85269, 10297, 1584, 9525, 14124, 4469, 8990, 2100, 9288, 64698, 10480, 20893, 33230, 1586, 9943, 16334, 68862, 9011, 14031, 6178, 21225, 1420, 32236, 2099, 2150, 26583, 2784, 8941, 9811, 27444, 50566 or 66428 activity. Such 140, 1470, 1686, 2089, 2427, 3702, 5891, 6428, 7181, 7660, 25641, 69583, 49863, 8897, 1682, 17667, 9235, 3703, 14171, 10359, 1660, 1450, 18894, 2088, 32427, 2160, 9252, 9389, 1642, 85269, 10297, 1584, 9525, 14124, 4469, 8990, 2100, 9288, 64698, 10480, 20893, 33230, 1586, 9943, 16334, 68862, 9011, 14031, 6178, 21225, 1420, 32236, 2099, 2150, 26583, 2784, 8941, 9811, 27444, 50566 or 66428-binding proteins are also likely to be involved in the propagation of signals by the 140, 1470, 1686, 2089, 2427, 3702, 5891, 6428, 7181, 7660, 25641, 69583, 49863, 8897, 1682, 17667, 9235, 3703, 14171, 10359, 1660, 1450, 18894, 2088, 32427, 2160, 9252, 9389, 1642, 85269, 10297, 1584, 9525, 14124, 4469, 8990, 2100, 9288, 64698, 10480, 20893, 33230, 1586, 9943, 16334, 68862, 9011, 14031, 6178, 21225, 1420, 32236, 2099, 2150, 26583, 2784, 8941, 9811, 27444, 50566 or 66428 proteins or 140, 1470, 1686, 2089, 2427, 3702, 5891, 6428, 7181, 7660, 25641, 69583, 49863, 8897, 1682, 17667, 9235, 3703, 14171, 10359, 1660, 1450, 18894, 2088, 32427, 2160, 9252, 9389, 1642, 85269, 10297, 1584, 9525, 14124, 4469, 8990, 2100, 9288, 64698, 10480, 20893, 33230, 1586, 9943, 16334, 68862, 9011, 14031, 6178, 21225, 1420, 32236, 2099, 2150, 26583, 2784, 8941, 9811, 27444, 50566 or 66428 targets as, for example, downstream elements of a 140, 1470, 1686, 2089, 2427, 3702, 5891, 6428, 7181, 7660, 25641, 69583, 49863, 8897, 1682, 17667, 9235, 3703, 14171, 10359, 1660, 1450, 18894, 2088, 32427, 2160, 9252, 9389, 1642, 85269, 10297, 1584, 9525, 14124, 4469, 8990, 2100, 9288, 64698, 10480, 20893, 33230, 1586, 9943, 16334, 68862, 9011, 14031, 6178, 21225, 1420, 32236, 2099, 2150, 26583, 2784, 8941, 9811, 27444, 50566 or 66428-mediated signaling pathway. Alternatively, such 140, 1470, 1686, 2089, 2427, 3702, 5891, 6428, 7181, 7660, 25641, 69583, 49863, 8897, 1682, 17667, 9235, 3703, 14171, 10359, 1660, 1450, 18894, 2088, 32427, 2160, 9252, 9389, 1642, 85269, 10297, 1584, 9525, 14124, 4469, 8990, 2100, 9288, 64698, 10480, 20893, 33230, 1586, 9943, 16334, 68862, 9011, 14031, 6178, 21225, 1420, 32236, 2099, 2150, 26583, 2784, 8941, 9811, 27444, 50566 or 66428-binding proteins are likely to be 140, 1470, 1686, 2089, 2427, 3702, 5891, 6428, 7181, 7660, 25641, 69583, 49863, 8897, 1682, 17667, 9235, 3703, 14171, 10359, 1660, 1450, 18894, 2088, 32427, 2160, 9252, 9389, 1642, 85269, 10297, 1584, 9525, 14124, 4469, 8990, 2100, 9288, 64698, 10480, 20893, 33230, 1586, 9943, 16334, 68862, 9011, 14031, 6178, 21225, 1420, 32236, 2099, 2150, 26583, 2784, 8941, 9811, 27444, 50566 or 66428 inhibitors.

[0545] The two-hybrid system is based on the modular nature of most transcription factors, which consist of separable DNA-binding and activation domains. Briefly, the assay utilizes two different DNA constructs. In one construct, the gene that codes for a 140, 1470, 1686, 2089, 2427, 3702, 5891, 6428, 7181, 7660, 25641, 69583, 49863, 8897, 1682, 17667, 9235, 3703, 14171, 10359, 1660, 1450, 18894, 2088, 32427, 2160, 9252, 9389, 1642, 85269, 10297, 1584, 9525, 14124, 4469, 8990, 2100, 9288, 64698, 10480, 20893, 33230, 1586, 9943, 16334, 68862, 9011, 14031, 6178, 21225, 1420, 32236, 2099, 2150, 26583, 2784, 8941, 9811, 27444, 50566 or 66428 protein is fused to a gene encoding the DNA binding domain of a known transcription factor (e.g., GAL-4). In the other construct, a DNA sequence, from a library of DNA sequences, that encodes an unidentified protein (“prey” or “sample”) is fused to a gene that codes for the activation domain of the known transcription factor. If the “bait” and the “prey” proteins are able to interact, in vivo, forming a 140, 1470, 1686, 2089, 2427, 3702, 5891, 6428, 7181, 7660, 25641, 69583, 49863, 8897, 1682, 17667, 9235, 3703, 14171, 10359, 1660, 1450, 18894, 2088, 32427, 2160, 9252, 9389, 1642, 85269, 10297, 1584, 9525, 14124, 4469, 8990, 2100, 9288, 64698, 10480, 20893, 33230, 1586, 9943, 16334, 68862, 9011, 14031, 6178, 21225, 1420, 32236, 2099, 2150, 26583, 2784, 8941, 9811, 27444, 50566 or 66428-dependent complex, the DNA-binding and activation domains of the transcription factor are brought into close proximity. This proximity allows transcription of a reporter gene (e.g., LacZ) which is operably linked to a transcriptional regulatory site responsive to the transcription factor. Expression of the reporter gene can be detected and cell colonies containing the functional transcription factor can be isolated and used to obtain the cloned gene which encodes the protein which interacts with the 140, 1470, 1686, 2089, 2427, 3702, 5891, 6428, 7181, 7660, 25641, 69583, 49863, 8897, 1682, 17667, 9235, 3703, 14171, 10359, 1660, 1450, 18894, 2088, 32427, 2160, 9252, 9389, 1642, 85269, 10297, 1584, 9525, 14124, 4469, 8990, 2100, 9288, 64698, 10480, 20893, 33230, 1586, 9943, 16334, 68862, 9011, 14031, 6178, 21225, 1420, 32236, 2099, 2150, 26583, 2784, 8941, 9811, 27444, 50566 or 66428 protein.

[0546] In another aspect, the invention pertains to a combination of two or more of the assays described herein. For example, a modulating agent can be identified using a cell-based or a cell free assay, and the ability of the agent to modulate the activity of a 140, 1470, 1686, 2089, 2427, 3702, 5891, 6428, 7181, 7660, 25641, 69583, 49863, 8897, 1682, 17667, 9235, 3703, 14171, 10359, 1660, 1450, 18894, 2088, 32427, 2160, 9252, 9389, 1642, 85269, 10297, 1584, 9525, 14124, 4469, 8990, 2100, 9288, 64698, 10480, 20893, 33230, 1586, 9943, 16334, 68862, 9011, 14031, 6178, 21225, 1420, 32236, 2099, 2150, 26583, 2784, 8941, 9811, 27444, 50566 or 66428 protein can be confirmed in vivo, e.g., in an animal such as an animal model for a cancer, as described herein.

[0547] This invention further pertains to novel agents identified by the above-described screening assays. Accordingly, it is within the scope of this invention to further use an agent identified as described herein in an appropriate animal model. For example, an agent identified as described herein (e.g., a 140, 1470, 1686, 2089, 2427, 3702, 5891, 6428, 7181, 7660, 25641, 69583, 49863, 8897, 1682, 17667, 9235, 3703, 14171, 10359, 1660, 1450, 18894, 2088, 32427, 2160, 9252, 9389, 1642, 85269, 10297, 1584, 9525, 14124, 4469, 8990, 2100, 9288, 64698, 10480, 20893, 33230, 1586, 9943, 16334, 68862, 9011, 14031, 6178, 21225, 1420, 32236, 2099, 2150, 26583, 2784, 8941, 9811, 27444, 50566 or 66428 modulating agent, an antisense 140, 1470, 1686, 2089, 2427, 3702, 5891, 6428, 7181, 7660, 25641, 69583, 49863, 8897, 1682, 17667, 9235, 3703, 14171, 10359, 1660, 1450, 18894, 2088, 32427, 2160, 9252, 9389, 1642, 85269, 10297, 1584, 9525, 14124, 4469, 8990, 2100, 9288, 64698, 10480, 20893, 33230, 1586, 9943, 16334, 68862, 9011, 14031, 6178, 21225, 1420, 32236, 2099, 2150, 26583, 2784, 8941, 9811, 27444, 50566 or 66428 nucleic acid molecule, a 140, 1470, 1686, 2089, 2427, 3702, 5891, 6428, 7181, 7660, 25641, 69583, 49863, 8897, 1682, 17667, 9235, 3703, 14171, 10359, 1660, 1450, 18894, 2088, 32427, 2160, 9252, 9389, 1642, 85269, 10297, 1584, 9525, 14124, 4469, 8990, 2100, 9288, 64698, 10480, 20893, 33230, 1586, 9943, 16334, 68862, 9011, 14031, 6178, 21225, 1420, 32236, 2099, 2150, 26583, 2784, 8941, 9811, 27444, 50566 or 66428-specific antibody, or a 140, 1470, 1686, 2089, 2427, 3702, 5891, 6428, 7181, 7660, 25641, 69583, 49863, 8897, 1682, 17667, 9235, 3703, 14171, 10359, 1660, 1450, 18894, 2088, 32427, 2160, 9252, 9389, 1642, 85269, 10297, 1584, 9525, 14124, 4469, 8990, 2100, 9288, 64698, 10480, 20893, 33230, 1586, 9943, 16334, 68862, 9011, 14031, 6178, 21225, 1420, 32236, 2099, 2150, 26583, 2784, 8941, 9811, 27444, 50566 or 66428-binding partner) can be used in an animal model to determine the efficacy, toxicity, or side effects of treatment with such an agent. Alternatively, an agent identified as described herein can be used in an animal model to determine the mechanism of action of such an agent. Furthermore, this invention pertains to uses of novel agents identified by the above-described screening assays for treatments as described herein.

[0548] Any of the compounds, including but not limited to compounds such as those identified in the foregoing assay systems, may be tested for the ability to ameliorate at least one symptom of a cancer. Cell-based and animal model-based assays for the identification of compounds exhibiting such an ability to ameliorate at least one symptom of a cancer are described herein.

[0549] In addition, animal-based models of a cancer, such as those described herein, may be used to identify compounds capable of treating a cancer. Such animal models may be used as test substrates for the identification of drugs, pharmaceuticals, therapies, and interventions which may be effective in treating a cancer. For example, animal models may be exposed to a compound, suspected of exhibiting an ability to treat a cancer, at a sufficient concentration and for a time sufficient to elicit such an amelioration of at least one symptom of a cancer in the exposed animals. The response of the animals to the exposure may be monitored by assessing the reversal of the symptoms of a cancer before and after treatment.

[0550] With regard to intervention, any treatments which reverse any aspect of acancer (i.e. have an effect on a cancer including but not limited to cancers of the lung, ovary, prostate, breast, colon or other disease state characterized by modulation of angiogenesis) should be considered as candidates for a human cancer therapeutic intervention. Dosages of test agents may be determined by deriving dose-response curves.

[0551] Additionally, gene expression patterns may be utilized to assess the ability of a compound to ameliorate at least one symptom of a cancer. For example, the expression pattern of one or more genes may form part of a “gene expression profile” or “transcriptional profile” which may be then be used in such an assessment. “Gene expression profile” or “transcriptional profile”, as used herein, includes the pattern of mRNA expression obtained for a given tissue or cell type under a given set of conditions. Gene expression profiles may be generated, for example, by utilizing a differential display procedure, Northern analysis and/or RT-PCR. In one embodiment, 140, 1470, 1686, 2089, 2427, 3702, 5891, 6428, 7181, 7660, 25641, 69583, 49863, 8897, 1682, 17667, 9235, 3703, 14171, 10359, 1660, 1450, 18894, 2088, 32427, 2160, 9252, 9389, 1642, 85269, 10297, 1584, 9525, 14124, 4469, 8990, 2100, 9288, 64698, 10480, 20893, 33230, 1586, 9943, 16334, 68862, 9011, 14031, 6178, 21225, 1420, 32236, 2099, 2150, 26583, 2784, 8941, 9811, 27444, 50566 or 66428 gene sequences may be used as probes and/or PCR primers for the generation and corroboration of such gene expression profiles.

[0552] Gene expression profiles may be characterized for known states, either cancer or normal, within the cell- and/or animal-based model systems. Subsequently, these known gene expression profiles may be compared to ascertain the effect a test compound has to modify such gene expression profiles, and to cause the profile to more closely resemble that of a more desirable profile.

[0553] For example, administration of a compound may cause the gene expression profile of a cancer disease model system to more closely resemble the control system. Administration of a compound may, alternatively, cause the gene expression profile of a control system to begin to mimic a cancer or a cancer disease state. Such a compound may, for example, be used in further characterizing the compound of interest, or may be used in the generation of additional animal models.

[0554] Cell- and Animal-Based Model Systems

[0555] Described herein are cell- and animal-based systems which act as models for cancer. These systems may be used in a variety of applications. For example, the cell- and animal-based model systems may be used to further characterize differentially expressed genes associated with a cancer, e.g., 140, 1470, 1686, 2089, 2427, 3702, 5891, 6428, 7181, 7660, 25641, 69583, 49863, 8897, 1682, 17667, 9235, 3703, 14171, 10359, 1660, 1450, 18894, 2088, 32427, 2160, 9252, 9389, 1642, 85269, 10297, 1584, 9525, 14124, 4469, 8990, 2100, 9288, 64698, 10480, 20893, 33230, 1586, 9943, 16334, 68862, 9011, 14031, 6178, 21225, 1420, 32236, 2099, 2150, 26583, 2784, 8941, 9811, 27444, 50566 or 66428. In addition, animal- and cell-based assays may be used as part of screening strategies designed to identify compounds which are capable of ameliorating at least one symptom of a cancer, as described, below. Thus, the animal- and cell-based models may be used to identify drugs, pharmaceuticals, therapies and interventions which may be effective in treating a cancer. Furthermore, such animal models may be used to determine the LD50 and the ED50 in animal subjects, and such data can be used to determine the in vivo efficacy of potential cancer treatments.

[0556] Animal-Based Systems

[0557] Animal-based model systems of cancer may include, but are not limited to, non-recombinant and engineered transgenic animals.

[0558] Non-recombinant animal models for cancer may include, for example, genetic models.

[0559] Models for studying angiogenesis in vivo include tumor cell-induced angiogenesis and tumor metastasis (Hoffman, R M (1998-99) Cancer Metastasis Rev. 17:271-277; Holash, J et al. (1999) Oncogene 18:5356-5362; Li, C Y et al. (2000) J. Natl Cancer Inst. 92:143-147), matrix induced angiogenesis (U.S. Pat. No. 5,382,514), the disc angiogenesis system (Kowalski, J. et al. (1992) Exp. Mol. Pathol. 56:1-19), the rodent mesenteric-window angiogenesis assay (Norrby, K (1992) EXS 61:282-286), experimental choroidal neovascularization in the rat (Shen, W Y et al. (1998) Br. J. Ophthalmol. 82:1063-1071), and the chick embryo development (Brooks, P C et al. Methods Mol. Biol. (1999) 129:257-269) and chick embryo chorioallantoic membrane (CAM) models (McNatt L G et al. (1999) J. Ocul. Pharmacol. Ther. 15:413-423; Ribatti, D et al. (1996) Int. J. Dev. Biol. 40:1189-1197), and are reviewed in Ribatti, D and Vacca, A (1999) Int. J. Biol. Markers 14:207-213.

[0560] Animal based models for studying tumorigenesis in vivo are well known in the art (reviewed in Animal Models of Cancer Predisposition Syndromes, Hiai, H and Hino, O (eds.) 1999, Progress in Experimental Tumor Research, Vol. 35; Clarke A R Carcinogenesis (2000) 21:435-41) and include, for example, carcinogen-induced tumors (Rithidech, K et al. Mutat Res (1999) 428:33-39; Miller, M L et al. Environ Mol Mutagen (2000) 35:319-327), injection and/or transplantation of tumor cells into an animal, as well as animals bearing mutations in growth regulatory genes, for example, oncogenes (e.g., ras) (Arbeit, J M et al. Am J Pathol (1993) 142:1187-1197; Sinn, E et al. Cell (1987) 49:465-475; Thorgeirsson, S S et al. Toxicol Lett (2000) 112-113:553-555) and tumor suppressor genes (e.g., p53) (Vooijs, M et al. Oncogene (1999) 18:5293-5303; Clark A R Cancer Metast Rev (1995) 14:125-148; Kumar, T R et al. J Intern Med (1995) 238:233-238; Donehower, L A et al. (1992) Nature 356215-221). Furthermore, experimental model systems are available for the study of, for example, ovarian cancer (Hamilton, T C et al. Semin Oncol (1984) 11:285-298; Rahman, N A et al. Mol Cell Endocrinol (1998) 145:167-174; Beamer, W G et al. Toxicol Pathol (1998) 26:704-710), gastric cancer (Thompson, J et al. Int J Cancer (2000) 86:863-869; Fodde, R et al. Cytogenet Cell Genet (1999) 86:105-111), breast cancer (Li, M et al. Oncogene (2000) 19:1010-1019; Green, J E et al. Oncogene (2000) 19:1020-1027), melanoma (Satyamoorthy, K et al. Cancer Metast Rev (1999) 18:401-405), and prostate cancer (Shirai, T et al. Mutat Res (2000) 462:219-226; Bostwick, D G et al. Prostate (2000) 43:286-294).

[0561] Additionally, animal models exhibiting a cancer may be engineered by using, for example, 140, 1470, 1686, 2089, 2427, 3702, 5891, 6428, 7181, 7660, 25641, 69583, 49863, 8897, 1682, 17667, 9235, 3703, 14171, 10359, 1660, 1450, 18894, 2088, 32427, 2160, 9252, 9389, 1642, 85269, 10297, 1584, 9525, 14124, 4469, 8990, 2100, 9288, 64698, 10480, 20893, 33230, 1586, 9943, 16334, 68862, 9011, 14031, 6178, 21225, 1420, 32236, 2099, 2150, 26583, 2784, 8941, 9811, 27444, 50566 or 66428 gene sequences described above, in conjunction with techniques for producing transgenic animals that are well known to those of skill in the art. For example, 140, 1470, 1686, 2089, 2427, 3702, 5891, 6428, 7181, 7660, 25641, 69583, 49863, 8897, 1682, 17667, 9235, 3703, 14171, 10359, 1660, 1450, 18894, 2088, 32427, 2160, 9252, 9389, 1642, 85269, 10297, 1584, 9525, 14124, 4469, 8990, 2100, 9288, 64698, 10480, 20893, 33230, 1586, 9943, 16334, 68862, 9011, 14031, 6178, 21225, 1420, 32236, 2099, 2150, 26583, 2784, 8941, 9811, 27444, 50566 or 66428 gene sequences may be introduced into, and overexpressed in, the genome of the animal of interest, or, if endogenous 140, 1470, 1686, 2089, 2427, 3702, 5891, 6428, 7181, 7660, 25641, 69583, 49863, 8897, 1682, 17667, 9235, 3703, 14171, 10359, 1660, 1450, 18894, 2088, 32427, 2160, 9252, 9389, 1642, 85269, 10297, 1584, 9525, 14124, 4469, 8990, 2100, 9288, 64698, 10480, 20893, 33230, 1586, 9943, 16334, 68862, 9011, 14031, 6178, 21225, 1420, 32236, 2099, 2150, 26583, 2784, 8941, 9811, 27444, 50566 or 66428 gene sequences are present, they may either be overexpressed or, alternatively, be disrupted in order to underexpress or inactivate 140, 1470, 1686, 2089, 2427, 3702, 5891, 6428, 7181, 7660, 25641, 69583, 49863, 8897, 1682, 17667, 9235, 3703, 14171, 10359, 1660, 1450, 18894, 2088, 32427, 2160, 9252, 9389, 1642, 85269, 10297, 1584, 9525, 14124, 4469, 8990, 2100, 9288, 64698, 10480, 20893, 33230, 1586, 9943, 16334, 68862, 9011, 14031, 6178, 21225, 1420, 32236, 2099, 2150, 26583, 2784, 8941, 9811, 27444, 50566 or 66428 gene expression.

[0562] The host cells of the invention can also be used to produce non-human transgenic animals. For example, in one embodiment, a host cell of the invention is a fertilized oocyte or an embryonic stem cell into which 140, 1470, 1686, 2089, 2427, 3702, 5891, 6428, 7181, 7660, 25641, 69583, 49863, 8897, 1682, 17667, 9235, 3703, 14171, 10359, 1660, 1450, 18894, 2088, 32427, 2160, 9252, 9389, 1642, 85269, 10297, 1584, 9525, 14124, 4469, 8990, 2100, 9288, 64698, 10480, 20893, 33230, 1586, 9943, 16334, 68862, 9011, 14031, 6178, 21225, 1420, 32236, 2099, 2150, 26583, 2784, 8941, 9811, 27444, 50566 or 66428-coding sequences have been introduced. Such host cells can then be used to create non-human transgenic animals in which exogenous 140, 1470, 1686, 2089, 2427, 3702, 5891, 6428, 7181, 7660, 25641, 69583, 49863, 8897, 1682, 17667, 9235, 3703, 14171, 10359, 1660, 1450, 18894, 2088, 32427, 2160, 9252, 9389, 1642, 85269, 10297, 1584, 9525, 14124, 4469, 8990, 2100, 9288, 64698, 10480, 20893, 33230, 1586, 9943, 16334, 68862, 9011, 14031, 6178, 21225, 1420, 32236, 2099, 2150, 26583, 2784, 8941, 9811, 27444, 50566 or 66428 sequences have been introduced into their genome or homologous recombinant animals in which endogenous 140, 1470, 1686, 2089, 2427, 3702, 5891, 6428, 7181, 7660, 25641, 69583, 49863, 8897, 1682, 17667, 9235, 3703, 14171, 10359, 1660, 1450, 18894, 2088, 32427, 2160, 9252, 9389, 1642, 85269, 10297, 1584, 9525, 14124, 4469, 8990, 2100, 9288, 64698, 10480, 20893, 33230, 1586, 9943, 16334, 68862, 9011, 14031, 6178, 21225, 1420, 32236, 2099, 2150, 26583, 2784, 8941, 9811, 27444, 50566 or 66428 sequences have been altered. Such animals are useful for studying the function and/or activity of a 140, 1470, 1686, 2089, 2427, 3702, 5891, 6428, 7181, 7660, 25641, 69583, 49863, 8897, 1682, 17667, 9235, 3703, 14171, 10359, 1660, 1450, 18894, 2088, 32427, 2160, 9252, 9389, 1642, 85269, 10297, 1584, 9525, 14124, 4469, 8990, 2100, 9288, 64698, 10480, 20893, 33230, 1586, 9943, 16334, 68862, 9011, 14031, 6178, 21225, 1420, 32236, 2099, 2150, 26583, 2784, 8941, 9811, 27444, 50566 or 66428 and for identifying and/or evaluating modulators of 140, 1470, 1686, 2089, 2427, 3702, 5891, 6428, 7181, 7660, 25641, 69583, 49863, 8897, 1682, 17667, 9235, 3703, 14171, 10359, 1660, 1450, 18894, 2088, 32427, 2160, 9252, 9389, 1642, 85269, 10297, 1584, 9525, 14124, 4469, 8990, 2100, 9288, 64698, 10480, 20893, 33230, 1586, 9943, 16334, 68862, 9011, 14031, 6178, 21225, 1420, 32236, 2099, 2150, 26583, 2784, 8941, 9811, 27444, 50566 or 66428 activity. As used herein, a “transgenic animal” is a non-human animal, preferably a mammal, more preferably a rodent such as a rat or mouse, in which one or more of the cells of the animal includes a transgene. Other examples of transgenic animals include non-human primates, sheep, dogs, cows, goats, chickens, amphibians, and the like. A transgene is exogenous DNA which is integrated into the genome of a cell from which a transgenic animal develops and which remains in the genome of the mature animal, thereby directing the expression of an encoded gene product in one or more cell types or tissues of the transgenic animal. As used herein, a “homologous recombinant animal” is a non-human animal, preferably a mammal, more preferably a mouse, in which an endogenous 140, 1470, 1686, 2089, 2427, 3702, 5891, 6428, 7181, 7660, 25641, 69583, 49863, 8897, 1682, 17667, 9235, 3703, 14171, 10359, 1660, 1450, 18894, 2088, 32427, 2160, 9252, 9389, 1642, 85269, 10297, 1584, 9525, 14124, 4469, 8990, 2100, 9288, 64698, 10480, 20893, 33230, 1586, 9943, 16334, 68862, 9011, 14031, 6178, 21225, 1420, 32236, 2099, 2150, 26583, 2784, 8941, 9811, 27444, 50566 or 66428 gene has been altered by homologous recombination between the endogenous gene and an exogenous DNA molecule introduced into a cell of the animal, e.g., an embryonic cell of the animal, prior to development of the animal.

[0563] A transgenic animal used in the methods of the invention can be created by introducing a 140, 1470, 1686, 2089, 2427, 3702, 5891, 6428, 7181, 7660, 25641, 69583, 49863, 8897, 1682, 17667, 9235, 3703, 14171, 10359, 1660, 1450, 18894, 2088, 32427, 2160, 9252, 9389, 1642, 85269, 10297, 1584, 9525, 14124, 4469, 8990, 2100, 9288, 64698, 10480, 20893, 33230, 1586, 9943, 16334, 68862, 9011, 14031, 6178, 21225, 1420, 32236, 2099, 2150, 26583, 2784, 8941, 9811, 27444, 50566 or 66428-encoding nucleic acid into the male pronuclei of a fertilized oocyte, e.g., by microinjection, retroviral infection, and allowing the oocyte to develop in a pseudopregnant female foster animal. The 140, 1470, 1686, 2089, 2427, 3702, 5891, 6428, 7181, 7660, 25641, 69583, 49863, 8897, 1682, 17667, 9235, 3703, 14171, 10359, 1660, 1450, 18894, 2088, 32427, 2160, 9252, 9389, 1642, 85269, 10297, 1584, 9525, 14124, 4469, 8990, 2100, 9288, 64698, 10480, 20893, 33230, 1586, 9943, 16334, 68862, 9011, 14031, 6178, 21225, 1420, 32236, 2099, 2150, 26583, 2784, 8941, 9811, 27444, 50566 or 66428 cDNA sequence can be introduced as a transgene into the genome of a non-human animal. Alternatively, a nonhuman homologue of a human 140, 1470, 1686, 2089, 2427, 3702, 5891, 6428, 7181, 7660, 25641, 69583, 49863, 8897, 1682, 17667, 9235, 3703, 14171, 10359, 1660, 1450, 18894, 2088, 32427, 2160, 9252, 9389, 1642, 85269, 10297, 1584, 9525, 14124, 4469, 8990, 2100, 9288, 64698, 10480, 20893, 33230, 1586, 9943, 16334, 68862, 9011, 14031, 6178, 21225, 1420, 32236, 2099, 2150, 26583, 2784, 8941, 9811, 27444, 50566 or 66428 gene, such as a mouse or rat 140, 1470, 1686, 2089, 2427, 3702, 5891, 6428, 7181, 7660, 25641, 69583, 49863, 8897, 1682, 17667, 9235, 3703, 14171, 10359, 1660, 1450, 18894, 2088, 32427, 2160, 9252, 9389, 1642, 85269, 10297, 1584, 9525, 14124, 4469, 8990, 2100, 9288, 64698, 10480, 20893, 33230, 1586, 9943, 16334, 68862, 9011, 14031, 6178, 21225, 1420, 32236, 2099, 2150, 26583, 2784, 8941, 9811, 27444, 50566 or 66428 gene, can be used as a transgene. Alternatively, a 140, 1470, 1686, 2089, 2427, 3702, 5891, 6428, 7181, 7660, 25641, 69583, 49863, 8897, 1682, 17667, 9235, 3703, 14171, 10359, 1660, 1450, 18894, 2088, 32427, 2160, 9252, 9389, 1642, 85269, 10297, 1584, 9525, 14124, 4469, 8990, 2100, 9288, 64698, 10480, 20893, 33230, 1586, 9943, 16334, 68862, 9011, 14031, 6178, 21225, 1420, 32236, 2099, 2150, 26583, 2784, 8941, 9811, 27444, 50566 or 66428 gene homologue, such as another 140, 1470, 1686, 2089, 2427, 3702, 5891, 6428, 7181, 7660, 25641, 69583, 49863, 8897, 1682, 17667, 9235, 3703, 14171, 10359, 1660, 1450, 18894, 2088, 32427, 2160, 9252, 9389, 1642, 85269, 10297, 1584, 9525, 14124, 4469, 8990, 2100, 9288, 64698, 10480, 20893, 33230, 1586, 9943, 16334, 68862, 9011, 14031, 6178, 21225, 1420, 32236, 2099, 2150, 26583, 2784, 8941, 9811, 27444, 50566 or 66428 family member, can be isolated based on hybridization to the 140, 1470, 1686, 2089, 2427, 3702, 5891, 6428, 7181, 7660, 25641, 69583, 49863, 8897, 1682, 17667, 9235, 3703, 14171, 10359, 1660, 1450, 18894, 2088, 32427, 2160, 9252, 9389, 1642, 85269, 10297, 1584, 9525, 14124, 4469, 8990, 2100, 9288, 64698, 10480, 20893, 33230, 1586, 9943, 16334, 68862, 9011, 14031, 6178, 21225, 1420, 32236, 2099, 2150, 26583, 2784, 8941, 9811, 27444, 50566 or 66428 cDNA sequences and used as a transgene. Intronic sequences and polyadenylation signals can also be included in the transgene to increase the efficiency of expression of the transgene. A tissue-specific regulatory sequence(s) can be operably linked to a 140, 1470, 1686, 2089, 2427, 3702, 5891, 6428, 7181, 7660, 25641, 69583, 49863, 8897, 1682, 17667, 9235, 3703, 14171, 10359, 1660, 1450, 18894, 2088, 32427, 2160, 9252, 9389, 1642, 85269, 10297, 1584, 9525, 14124, 4469, 8990, 2100, 9288, 64698, 10480, 20893, 33230, 1586, 9943, 16334, 68862, 9011, 14031, 6178, 21225, 1420, 32236, 2099, 2150, 26583, 2784, 8941, 9811, 27444, 50566 or 66428 transgene to direct expression of a 140, 1470, 1686, 2089, 2427, 3702, 5891, 6428, 7181, 7660, 25641, 69583, 49863, 8897, 1682, 17667, 9235, 3703, 14171, 10359, 1660, 1450, 18894, 2088, 32427, 2160, 9252, 9389, 1642, 85269, 10297, 1584, 9525, 14124, 4469, 8990, 2100, 9288, 64698, 10480, 20893, 33230, 1586, 9943, 16334, 68862, 9011, 14031, 6178, 21225, 1420, 32236, 2099, 2150, 26583, 2784, 8941, 9811, 27444, 50566 or 66428 protein to particular cells. Methods for generating transgenic animals via embryo manipulation and microinjection, particularly animals such as mice, have become conventional in the art and are described, for example, in U.S. Pat. Nos. 4,736,866 and 4,870,009, both by Leder et al., U.S. Pat. No. 4,873,191 by Wagner et al. and in Hogan, B., Manipulating the Mouse Embryo, (Cold Spring Harbor Laboratory Press, Cold Spring Harbor, N.Y., 1986). Similar methods are used for production of other transgenic animals. A transgenic founder animal can be identified based upon the presence of a 140, 1470, 1686, 2089, 2427, 3702, 5891, 6428, 7181, 7660, 25641, 69583, 49863, 8897, 1682, 17667, 9235, 3703, 14171, 10359, 1660, 1450, 18894, 2088, 32427, 2160, 9252, 9389, 1642, 85269, 10297, 1584, 9525, 14124, 4469, 8990, 2100, 9288, 64698, 10480, 20893, 33230, 1586, 9943, 16334, 68862, 9011, 14031, 6178, 21225, 1420, 32236, 2099, 2150, 26583, 2784, 8941, 9811, 27444, 50566 or 66428 transgene in its genome and/or expression of 140, 1470, 1686, 2089, 2427, 3702, 5891, 6428, 7181, 7660, 25641, 69583, 49863, 8897, 1682, 17667, 9235, 3703, 14171, 10359, 1660, 1450, 18894, 2088, 32427, 2160, 9252, 9389, 1642, 85269, 10297, 1584, 9525, 14124, 4469, 8990, 2100, 9288, 64698, 10480, 20893, 33230, 1586, 9943, 16334, 68862, 9011, 14031, 6178, 21225, 1420, 32236, 2099, 2150, 26583, 2784, 8941, 9811, 27444, 50566 or 66428 mRNA in tissues or cells of the animals. A transgenic founder animal can then be used to breed additional animals carrying the transgene. Moreover, transgenic animals carrying a transgene encoding a 140, 1470, 1686, 2089, 2427, 3702, 5891, 6428, 7181, 7660, 25641, 69583, 49863, 8897, 1682, 17667, 9235, 3703, 14171, 10359, 1660, 1450, 18894, 2088, 32427, 2160, 9252, 9389, 1642, 85269, 10297, 1584, 9525, 14124, 4469, 8990, 2100, 9288, 64698, 10480, 20893, 33230, 1586, 9943, 16334, 68862, 9011, 14031, 6178, 21225, 1420, 32236, 2099, 2150, 26583, 2784, 8941, 9811, 27444, 50566 or 66428 protein can further be bred to other transgenic animals carrying other transgenes.

[0564] To create a homologous recombinant animal, a vector is prepared which contains at least a portion of a 140, 1470, 1686, 2089, 2427, 3702, 5891, 6428, 7181, 7660, 25641, 69583, 49863, 8897, 1682, 17667, 9235, 3703, 14171, 10359, 1660, 1450, 18894, 2088, 32427, 2160, 9252, 9389, 1642, 85269, 10297, 1584, 9525, 14124, 4469, 8990, 2100, 9288, 64698, 10480, 20893, 33230, 1586, 9943, 16334, 68862, 9011, 14031, 6178, 21225, 1420, 32236, 2099, 2150, 26583, 2784, 8941, 9811, 27444, 50566 or 66428 gene into which a deletion, addition or substitution has been introduced to thereby alter, e.g., functionally disrupt, the 140, 1470, 1686, 2089, 2427, 3702, 5891, 6428, 7181, 7660, 25641, 69583, 49863, 8897, 1682, 17667, 9235, 3703, 14171, 10359, 1660, 1450, 18894, 2088, 32427, 2160, 9252, 9389, 1642, 85269, 10297, 1584, 9525, 14124, 4469, 8990, 2100, 9288, 64698, 10480, 20893, 33230, 1586, 9943, 16334, 68862, 9011, 14031, 6178, 21225, 1420, 32236, 2099, 2150, 26583, 2784, 8941, 9811, 27444, 50566 or 66428 gene. The 140, 1470, 1686, 2089, 2427, 3702, 5891, 6428, 7181, 7660, 25641, 69583, 49863, 8897, 1682, 17667, 9235, 3703, 14171, 10359, 1660, 1450, 18894, 2088, 32427, 2160, 9252, 9389, 1642, 85269, 10297, 1584, 9525, 14124, 4469, 8990, 2100, 9288, 64698, 10480, 20893, 33230, 1586, 9943, 16334, 68862, 9011, 14031, 6178, 21225, 1420, 32236, 2099, 2150, 26583, 2784, 8941, 9811, 27444, 50566 or 66428 gene can be a human gene but more preferably, is a non-human homologue of a human 140, 1470, 1686, 2089, 2427, 3702, 5891, 6428, 7181, 7660, 25641, 69583, 49863, 8897, 1682, 17667, 9235, 3703, 14171, 10359, 1660, 1450, 18894, 2088, 32427, 2160, 9252, 9389, 1642, 85269, 10297, 1584, 9525, 14124, 4469, 8990, 2100, 9288, 64698, 10480, 20893, 33230, 1586, 9943, 16334, 68862, 9011, 14031, 6178, 21225, 1420, 32236, 2099, 2150, 26583, 2784, 8941, 9811, 27444, 50566 or 66428 gene. For example, a rat 140, 1470, 1686, 2089, 2427, 3702, 5891, 6428, 7181, 7660, 25641, 69583, 49863, 8897, 1682, 17667, 9235, 3703, 14171, 10359, 1660, 1450, 18894, 2088, 32427, 2160, 9252, 9389, 1642, 85269, 10297, 1584, 9525, 14124, 4469, 8990, 2100, 9288, 64698, 10480, 20893, 33230, 1586, 9943, 16334, 68862, 9011, 14031, 6178, 21225, 1420, 32236, 2099, 2150, 26583, 2784, 8941, 9811, 27444, 50566 or 66428 gene can be used to construct a homologous recombination nucleic acid molecule, e.g., a vector, suitable for altering an endogenous 140, 1470, 1686, 2089, 2427, 3702, 5891, 6428, 7181, 7660, 25641, 69583, 49863, 8897, 1682, 17667, 9235, 3703, 14171, 10359, 1660, 1450, 18894, 2088, 32427, 2160, 9252, 9389, 1642, 85269, 10297, 1584, 9525, 14124, 4469, 8990, 2100, 9288, 64698, 10480, 20893, 33230, 1586, 9943, 16334, 68862, 9011, 14031, 6178, 21225, 1420, 32236, 2099, 2150, 26583, 2784, 8941, 9811, 27444, 50566 or 66428 gene in the mouse genome. In a preferred embodiment, the homologous recombination nucleic acid molecule is designed such that, upon homologous recombination, the endogenous 140, 1470, 1686, 2089, 2427, 3702, 5891, 6428, 7181, 7660, 25641, 69583, 49863, 8897, 1682, 17667, 9235, 3703, 14171, 10359, 1660, 1450, 18894, 2088, 32427, 2160, 9252, 9389, 1642, 85269, 10297, 1584, 9525, 14124, 4469, 8990, 2100, 9288, 64698, 10480, 20893, 33230, 1586, 9943, 16334, 68862, 9011, 14031, 6178, 21225, 1420, 32236, 2099, 2150, 26583, 2784, 8941, 9811, 27444, 50566 or 66428 gene is functionally disrupted (i.e., no longer encodes a functional protein; also referred to as a “knock out” vector). Alternatively, the homologous recombination nucleic acid molecule can be designed such that, upon homologous recombination, the endogenous 140, 1470, 1686, 2089, 2427, 3702, 5891, 6428, 7181, 7660, 25641, 69583, 49863, 8897, 1682, 17667, 9235, 3703, 14171, 10359, 1660, 1450, 18894, 2088, 32427, 2160, 9252, 9389, 1642, 85269, 10297, 1584, 9525, 14124, 4469, 8990, 2100, 9288, 64698, 10480, 20893, 33230, 1586, 9943, 16334, 68862, 9011, 14031, 6178, 21225, 1420, 32236, 2099, 2150, 26583, 2784, 8941, 9811, 27444, 50566 or 66428 gene is mutated or otherwise altered but still encodes functional protein (e.g., the upstream regulatory region can be altered to thereby alter the expression of the endogenous 140, 1470, 1686, 2089, 2427, 3702, 5891, 6428, 7181, 7660, 25641, 69583, 49863, 8897, 1682, 17667, 9235, 3703, 14171, 10359, 1660, 1450, 18894, 2088, 32427, 2160, 9252, 9389, 1642, 85269, 10297, 1584, 9525, 14124, 4469, 8990, 2100, 9288, 64698, 10480, 20893, 33230, 1586, 9943, 16334, 68862, 9011, 14031, 6178, 21225, 1420, 32236, 2099, 2150, 26583, 2784, 8941, 9811, 27444, 50566 or 66428 protein). In the homologous recombination nucleic acid molecule, the altered portion of the 140, 1470, 1686, 2089, 2427, 3702, 5891, 6428, 7181, 7660, 25641, 69583, 49863, 8897, 1682, 17667, 9235, 3703, 14171, 10359, 1660, 1450, 18894, 2088, 32427, 2160, 9252, 9389, 1642, 85269, 10297, 1584, 9525, 14124, 4469, 8990, 2100, 9288, 64698, 10480, 20893, 33230, 1586, 9943, 16334, 68862, 9011, 14031, 6178, 21225, 1420, 32236, 2099, 2150, 26583, 2784, 8941, 9811, 27444, 50566 or 66428 gene is flanked at its 5′ and 3′ ends by additional nucleic acid sequence of the 140, 1470, 1686, 2089, 2427, 3702, 5891, 6428, 7181, 7660, 25641, 69583, 49863, 8897, 1682, 17667, 9235, 3703, 14171, 10359, 1660, 1450, 18894, 2088, 32427, 2160, 9252, 9389, 1642, 85269, 10297, 1584, 9525, 14124, 4469, 8990, 2100, 9288, 64698, 10480, 20893, 33230, 1586, 9943, 16334, 68862, 9011, 14031, 6178, 21225, 1420, 32236, 2099, 2150, 26583, 2784, 8941, 9811, 27444, 50566 or 66428 gene to allow for homologous recombination to occur between the exogenous 140, 1470, 1686, 2089, 2427, 3702, 5891, 6428, 7181, 7660, 25641, 69583, 49863, 8897, 1682, 17667, 9235, 3703, 14171, 10359, 1660, 1450, 18894, 2088, 32427, 2160, 9252, 9389, 1642, 85269, 10297, 1584, 9525, 14124, 4469, 8990, 2100, 9288, 64698, 10480, 20893, 33230, 1586, 9943, 16334, 68862, 9011, 14031, 6178, 21225, 1420, 32236, 2099, 2150, 26583, 2784, 8941, 9811, 27444, 50566 or 66428 gene carried by the homologous recombination nucleic acid molecule and an endogenous 140, 1470, 1686, 2089, 2427, 3702, 5891, 6428, 7181, 7660, 25641, 69583, 49863, 8897, 1682, 17667, 9235, 3703, 14171, 10359, 1660, 1450, 18894, 2088, 32427, 2160, 9252, 9389, 1642, 85269, 10297, 1584, 9525, 14124, 4469, 8990, 2100, 9288, 64698, 10480, 20893, 33230, 1586, 9943, 16334, 68862, 9011, 14031, 6178, 21225, 1420, 32236, 2099, 2150, 26583, 2784, 8941, 9811, 27444, 50566 or 66428 gene in a cell, e.g., an embryonic stem cell. The additional flanking 140, 1470, 1686, 2089, 2427, 3702, 5891, 6428, 7181, 7660, 25641, 69583, 49863, 8897, 1682, 17667, 9235, 3703, 14171, 10359, 1660, 1450, 18894, 2088, 32427, 2160, 9252, 9389, 1642, 85269, 10297, 1584, 9525, 14124, 4469, 8990, 2100, 9288, 64698, 10480, 20893, 33230, 1586, 9943, 16334, 68862, 9011, 14031, 6178, 21225, 1420, 32236, 2099, 2150, 26583, 2784, 8941, 9811, 27444, 50566 or 66428 nucleic acid sequence is of sufficient length for successful homologous recombination with the endogenous gene. Typically, several kilobases of flanking DNA (both at the 5′ and 3′ ends) are included in the homologous recombination nucleic acid molecule (see, e.g., Thomas, K. R. and Capecchi, M. R. (1987) Cell 51:503 for a description of homologous recombination vectors). The homologous recombination nucleic acid molecule is introduced into a cell, e.g., an embryonic stem cell line (e.g., by electroporation) and cells in which the introduced 140, 1470, 1686, 2089, 2427, 3702, 5891, 6428, 7181, 7660, 25641, 69583, 49863, 8897, 1682, 17667, 9235, 3703, 14171, 10359, 1660, 1450, 18894, 2088, 32427, 2160, 9252, 9389, 1642, 85269, 10297, 1584, 9525, 14124, 4469, 8990, 2100, 9288, 64698, 10480, 20893, 33230, 1586, 9943, 16334, 68862, 9011, 14031, 6178, 21225, 1420, 32236, 2099, 2150, 26583, 2784, 8941, 9811, 27444, 50566 or 66428 gene has homologously recombined with the endogenous 140, 1470, 1686, 2089, 2427, 3702, 5891, 6428, 7181, 7660, 25641, 69583, 49863, 8897, 1682, 17667, 9235, 3703, 14171, 10359, 1660, 1450, 18894, 2088, 32427, 2160, 9252, 9389, 1642, 85269, 10297, 1584, 9525, 14124, 4469, 8990, 2100, 9288, 64698, 10480, 20893, 33230, 1586, 9943, 16334, 68862, 9011, 14031, 6178, 21225, 1420, 32236, 2099, 2150, 26583, 2784, 8941, 9811, 27444, 50566 or 66428 gene are selected (see e.g., Li, E. et al. (1992) Cell 69:915). The selected cells can then injected into a blastocyst of an animal (e.g., a mouse) to form aggregation chimeras (see e.g., Bradley, A. in Teratocarcinomas and Embryonic Stem Cells: A Practical Approach, E. J. Robertson, ed. (IRL, Oxford, 1987) pp. 113-152). A chimeric embryo can then be implanted into a suitable pseudopregnant female foster animal and the embryo brought to term. Progeny harboring the homologously recombined DNA in their germ cells can be used to breed animals in which all cells of the animal contain the homologously recombined DNA by germline transmission of the transgene. Methods for constructing homologous recombination nucleic acid molecules, e.g., vectors, or homologous recombinant animals are described further in Bradley, A. (1991) Current Opinion in Biotechnology 2:823-829 and in PCT International Publication Nos.: WO 90/11354 by Le Mouellec et al.; WO 91/01140 by Smithies et al.; WO 92/0968 by Zijlstra et al.; and WO 93/04169 by Berns et al.

[0565] In another embodiment, transgenic non-human animals for use in the methods of the invention can be produced which contain selected systems which allow for regulated expression of the transgene. One example of such a system is the cre/loxP recombinase system of bacteriophage P1. For a description of the cre/loxP recombinase system, see, e.g., Lakso et al. (1992) Proc. Natl. Acad. Sci. USA 89:6232-6236. Another example of a recombinase system is the FLP recombinase system of Saccharomyces cerevisiae (O'Gorman et al. (1991) Science 251:1351-1355. If a cre/loxP recombinase system is used to regulate expression of the transgene, animals containing transgenes encoding both the Cre recombinase and a selected protein are required. Such animals can be provided through the construction of “double” transgenic animals, e.g., by mating two transgenic animals, one containing a transgene encoding a selected protein and the other containing a transgene encoding a recombinase.

[0566] Clones of the non-human transgenic animals described herein can also be produced according to the methods described in Wilmut, I. et al. (1997) Nature 385:810-813 and PCT International Publication Nos. WO 97/07668 and WO 97/07669. In brief, a cell, e.g., a somatic cell, from the transgenic animal can be isolated and induced to exit the growth cycle and enter Gₒ phase. The quiescent cell can then be fused, e.g., through the use of electrical pulses, to an enucleated oocyte from an animal of the same species from which the quiescent cell is isolated. The reconstructed oocyte is then cultured such that it develops to morula or blastocyte and then transferred to pseudopregnant female foster animal. The offspring borne of this female foster animal will be a clone of the animal from which the cell, e.g., the somatic cell, is isolated.

[0567] The 140, 1470, 1686, 2089, 2427, 3702, 5891, 6428, 7181, 7660, 25641, 69583, 49863, 8897, 1682, 17667, 9235, 3703, 14171, 10359, 1660, 1450, 18894, 2088, 32427, 2160, 9252, 9389, 1642, 85269, 10297, 1584, 9525, 14124, 4469, 8990, 2100, 9288, 64698, 10480, 20893, 33230, 1586, 9943, 16334, 68862, 9011, 14031, 6178, 21225, 1420, 32236, 2099, 2150, 26583, 2784, 8941, 9811, 27444, 50566 or 66428 transgenic animals that express 140, 1470, 1686, 2089, 2427, 3702, 5891, 6428, 7181, 7660, 25641, 69583, 49863, 8897, 1682, 17667, 9235, 3703, 14171, 10359, 1660, 1450, 18894, 2088, 32427, 2160, 9252, 9389, 1642, 85269, 10297, 1584, 9525, 14124, 4469, 8990, 2100, 9288, 64698, 10480, 20893, 33230, 1586, 9943, 16334, 68862, 9011, 14031, 6178, 21225, 1420, 32236, 2099, 2150, 26583, 2784, 8941, 9811, 27444, 50566 or 66428 mRNA or a 140, 1470, 1686, 2089, 2427, 3702, 5891, 6428, 7181, 7660, 25641, 69583, 49863, 8897, 1682, 17667, 9235, 3703, 14171, 10359, 1660, 1450, 18894, 2088, 32427, 2160, 9252, 9389, 1642, 85269, 10297, 1584, 9525, 14124, 4469, 8990, 2100, 9288, 64698, 10480, 20893, 33230, 1586, 9943, 16334, 68862, 9011, 14031, 6178, 21225, 1420, 32236, 2099, 2150, 26583, 2784, 8941, 9811, 27444, 50566 or 66428 peptide (detected immunocytochemically, using antibodies directed against 140, 1470, 1686, 2089, 2427, 3702, 5891, 6428, 7181, 7660, 25641, 69583, 49863, 8897, 1682, 17667, 9235, 3703, 14171, 10359, 1660, 1450, 18894, 2088, 32427, 2160, 9252, 9389, 1642, 85269, 10297, 1584, 9525, 14124, 4469, 8990, 2100, 9288, 64698, 10480, 20893, 33230, 1586, 9943, 16334, 68862, 9011, 14031, 6178, 21225, 1420, 32236, 2099, 2150, 26583, 2784, 8941, 9811, 27444, 50566 or 66428 epitopes) at easily detectable levels should then be further evaluated to identify those animals which display a characteristic cancer.

[0568] Cell-Based Systems

[0569] Cells that contain and express 140, 1470, 1686, 2089, 2427, 3702, 5891, 6428, 7181, 7660, 25641, 69583, 49863, 8897, 1682, 17667, 9235, 3703, 14171, 10359, 1660, 1450, 18894, 2088, 32427, 2160, 9252, 9389, 1642, 85269, 10297, 1584, 9525, 14124, 4469, 8990, 2100, 9288, 64698, 10480, 20893, 33230, 1586, 9943, 16334, 68862, 9011, 14031, 6178, 21225, 1420, 32236, 2099, 2150, 26583, 2784, 8941, 9811, 27444, 50566 or 66428 gene sequences which encode a 140, 1470, 1686, 2089, 2427, 3702, 5891, 6428, 7181, 7660, 25641, 69583, 49863, 8897, 1682, 17667, 9235, 3703, 14171, 10359, 1660, 1450, 18894, 2088, 32427, 2160, 9252, 9389, 1642, 85269, 10297, 1584, 9525, 14124, 4469, 8990, 2100, 9288, 64698, 10480, 20893, 33230, 1586, 9943, 16334, 68862, 9011, 14031, 6178, 21225, 1420, 32236, 2099, 2150, 26583, 2784, 8941, 9811, 27444, 50566 or 66428 protein, and, further, exhibit cellular phenotypes associated with a cancer, may be used to identify compounds that exhibit an effect on a cancer. Such cells may include non-recombinant monocyte cell lines, such as U937 (ATCC#CRL-1593), THP-1 (ATCC#TIB-202), and P388D1 (ATCC#TIB-63); endothelial cells such as human umbilical vein endothelial cells (HUVECs), human microvascular endothelial cells (HMVEC), and bovine aortic endothelial cells (BAECs); as well as generic mammalian cell lines such as HeLa cells and COS cells, e.g., COS-7 (ATCC# CRL-1651), lung, colon, breast, prostate or ovarian cancer cell lines. Further, such cells may include recombinant, transgenic cell lines. For example, the cancer animal models of the invention, discussed above, may be used to generate cell lines, containing one or more cell types involved in cancer, that can be used as cell culture models for this disorder. While primary cultures derived from the cancer model transgenic animals of the invention may be utilized, the generation of continuous cell lines is preferred. For examples of techniques which may be used to derive a continuous cell line from the transgenic animals, see Small et al., (1985) Mol. Cell Biol. 5:642-648.

[0570] Alternatively, cells of a cell type known to be involved in cancer may be transfected with sequences capable of increasing or decreasing the amount of 140, 1470, 1686, 2089, 2427, 3702, 5891, 6428, 7181, 7660, 25641, 69583, 49863, 8897, 1682, 17667, 9235, 3703, 14171, 10359, 1660, 1450, 18894, 2088, 32427, 2160, 9252, 9389, 1642, 85269, 10297, 1584, 9525, 14124, 4469, 8990, 2100, 9288, 64698, 10480, 20893, 33230, 1586, 9943, 16334, 68862, 9011, 14031, 6178, 21225, 1420, 32236, 2099, 2150, 26583, 2784, 8941, 9811, 27444, 50566 or 66428 gene expression within the cell. For example, 140, 1470, 1686, 2089, 2427, 3702, 5891, 6428, 7181, 7660, 25641, 69583, 49863, 8897, 1682, 17667, 9235, 3703, 14171, 10359, 1660, 1450, 18894, 2088, 32427, 2160, 9252, 9389, 1642, 85269, 10297, 1584, 9525, 14124, 4469, 8990, 2100, 9288, 64698, 10480, 20893, 33230, 1586, 9943, 16334, 68862, 9011, 14031, 6178, 21225, 1420, 32236, 2099, 2150, 26583, 2784, 8941, 9811, 27444, 50566 or 66428 gene sequences may be introduced into, and overexpressed in, the genome of the cell of interest, or, if endogenous 140, 1470, 1686, 2089, 2427, 3702, 5891, 6428, 7181, 7660, 25641, 69583, 49863, 8897, 1682, 17667, 9235, 3703, 14171, 10359, 1660, 1450, 18894, 2088, 32427, 2160, 9252, 9389, 1642, 85269, 10297, 1584, 9525, 14124, 4469, 8990, 2100, 9288, 64698, 10480, 20893, 33230, 1586, 9943, 16334, 68862, 9011, 14031, 6178, 21225, 1420, 32236, 2099, 2150, 26583, 2784, 8941, 9811, 27444, 50566 or 66428 gene sequences are present, they may be either overexpressed or, alternatively disrupted in order to underexpress or inactivate 140, 1470, 1686, 2089, 2427, 3702, 5891, 6428, 7181, 7660, 25641, 69583, 49863, 8897, 1682, 17667, 9235, 3703, 14171, 10359, 1660, 1450, 18894, 2088, 32427, 2160, 9252, 9389, 1642, 85269, 10297, 1584, 9525, 14124, 4469, 8990, 2100, 9288, 64698, 10480, 20893, 33230, 1586, 9943, 16334, 68862, 9011, 14031, 6178, 21225, 1420, 32236, 2099, 2150, 26583, 2784, 8941, 9811, 27444, 50566 or 66428 gene expression.

[0571] In order to overexpress a 140, 1470, 1686, 2089, 2427, 3702, 5891, 6428, 7181, 7660, 25641, 69583, 49863, 8897, 1682, 17667, 9235, 3703, 14171, 10359, 1660, 1450, 18894, 2088, 32427, 2160, 9252, 9389, 1642, 85269, 10297, 1584, 9525, 14124, 4469, 8990, 2100, 9288, 64698, 10480, 20893, 33230, 1586, 9943, 16334, 68862, 9011, 14031, 6178, 21225, 1420, 32236, 2099, 2150, 26583, 2784, 8941, 9811, 27444, 50566 or 66428 gene, the coding portion of the 140, 1470, 1686, 2089, 2427, 3702, 5891, 6428, 7181, 7660, 25641, 69583, 49863, 8897, 1682, 17667, 9235, 3703, 14171, 10359, 1660, 1450, 18894, 2088, 32427, 2160, 9252, 9389, 1642, 85269, 10297, 1584, 9525, 14124, 4469, 8990, 2100, 9288, 64698, 10480, 20893, 33230, 1586, 9943, 16334, 68862, 9011, 14031, 6178, 21225, 1420, 32236, 2099, 2150, 26583, 2784, 8941, 9811, 27444, 50566 or 66428 gene may be ligated to a regulatory sequence which is capable of driving gene expression in the cell type of interest, e.g., an endothelial cell. Such regulatory regions will be well known to those of skill in the art, and may be utilized in the absence of undue experimentation. Recombinant methods for expressing target genes are described above.

[0572] For underexpression of an endogenous 140, 1470, 1686, 2089, 2427, 3702, 5891, 6428, 7181, 7660, 25641, 69583, 49863, 8897, 1682, 17667, 9235, 3703, 14171, 10359, 1660, 1450, 18894, 2088, 32427, 2160, 9252, 9389, 1642, 85269, 10297, 1584, 9525, 14124, 4469, 8990, 2100, 9288, 64698, 10480, 20893, 33230, 1586, 9943, 16334, 68862, 9011, 14031, 6178, 21225, 1420, 32236, 2099, 2150, 26583, 2784, 8941, 9811, 27444, 50566 or 66428 gene sequence, such a sequence may be isolated and engineered such that when reintroduced into the genome of the cell type of interest, the endogenous 140, 1470, 1686, 2089, 2427, 3702, 5891, 6428, 7181, 7660, 25641, 69583, 49863, 8897, 1682, 17667, 9235, 3703, 14171, 10359, 1660, 1450, 18894, 2088, 32427, 2160, 9252, 9389, 1642, 85269, 10297, 1584, 9525, 14124, 4469, 8990, 2100, 9288, 64698, 10480, 20893, 33230, 1586, 9943, 16334, 68862, 9011, 14031, 6178, 21225, 1420, 32236, 2099, 2150, 26583, 2784, 8941, 9811, 27444, 50566 or 66428 alleles will be inactivated. Preferably, the engineered 140, 1470, 1686, 2089, 2427, 3702, 5891, 6428, 7181, 7660, 25641, 69583, 49863, 8897, 1682, 17667, 9235, 3703, 14171, 10359, 1660, 1450, 18894, 2088, 32427, 2160, 9252, 9389, 1642, 85269, 10297, 1584, 9525, 14124, 4469, 8990, 2100, 9288, 64698, 10480, 20893, 33230, 1586, 9943, 16334, 68862, 9011, 14031, 6178, 21225, 1420, 32236, 2099, 2150, 26583, 2784, 8941, 9811, 27444, 50566 or 66428 sequence is introduced via gene targeting such that the endogenous 140, 1470, 1686, 2089, 2427, 3702, 5891, 6428, 7181, 7660, 25641, 69583, 49863, 8897, 1682, 17667, 9235, 3703, 14171, 10359, 1660, 1450, 18894, 2088, 32427, 2160, 9252, 9389, 1642, 85269, 10297, 1584, 9525, 14124, 4469, 8990, 2100, 9288, 64698, 10480, 20893, 33230, 1586, 9943, 16334, 68862, 9011, 14031, 6178, 21225, 1420, 32236, 2099, 2150, 26583, 2784, 8941, 9811, 27444, 50566 or 66428 sequence is disrupted upon integration of the engineered 140, 1470, 1686, 2089, 2427, 3702, 5891, 6428, 7181, 7660, 25641, 69583, 49863, 8897, 1682, 17667, 9235, 3703, 14171, 10359, 1660, 1450, 18894, 2088, 32427, 2160, 9252, 9389, 1642, 85269, 10297, 1584, 9525, 14124, 4469, 8990, 2100, 9288, 64698, 10480, 20893, 33230, 1586, 9943, 16334, 68862, 9011, 14031, 6178, 21225, 1420, 32236, 2099, 2150, 26583, 2784, 8941, 9811, 27444, 50566 or 66428 sequence into the cell's genome. Transfection of host cells with 140, 1470, 1686, 2089, 2427, 3702, 5891, 6428, 7181, 7660, 25641, 69583, 49863, 8897, 1682, 17667, 9235, 3703, 14171, 10359, 1660, 1450, 18894, 2088, 32427, 2160, 9252, 9389, 1642, 85269, 10297, 1584, 9525, 14124, 4469, 8990, 2100, 9288, 64698, 10480, 20893, 33230, 1586, 9943, 16334, 68862, 9011, 14031, 6178, 21225, 1420, 32236, 2099, 2150, 26583, 2784, 8941, 9811, 27444, 50566 or 66428 genes is discussed, above.

[0573] Cells treated with compounds or transfected with 140, 1470, 1686, 2089, 2427, 3702, 5891, 6428, 7181, 7660, 25641, 69583, 49863, 8897, 1682, 17667, 9235, 3703, 14171, 10359, 1660, 1450, 18894, 2088, 32427, 2160, 9252, 9389, 1642, 85269, 10297, 1584, 9525, 14124, 4469, 8990, 2100, 9288, 64698, 10480, 20893, 33230, 1586, 9943, 16334, 68862, 9011, 14031, 6178, 21225, 1420, 32236, 2099, 2150, 26583, 2784, 8941, 9811, 27444, 50566 or 66428 genes can be examined for phenotypes associated with cancer.

[0574] Transfection of 140, 1470, 1686, 2089, 2427, 3702, 5891, 6428, 7181, 7660, 25641, 69583, 49863, 8897, 1682, 17667, 9235, 3703, 14171, 10359, 1660, 1450, 18894, 2088, 32427, 2160, 9252, 9389, 1642, 85269, 10297, 1584, 9525, 14124, 4469, 8990, 2100, 9288, 64698, 10480, 20893, 33230, 1586, 9943, 16334, 68862, 9011, 14031, 6178, 21225, 1420, 32236, 2099, 2150, 26583, 2784, 8941, 9811, 27444, 50566 or 66428 nucleic acid may be accomplished by using standard techniques (described in, for example, Ausubel (1989) supra). Transfected cells should be evaluated for the presence of the recombinant 140, 1470, 1686, 2089, 2427, 3702, 5891, 6428, 7181, 7660, 25641, 69583, 49863, 8897, 1682, 17667, 9235, 3703, 14171, 10359, 1660, 1450, 18894, 2088, 32427, 2160, 9252, 9389, 1642, 85269, 10297, 1584, 9525, 14124, 4469, 8990, 2100, 9288, 64698, 10480, 20893, 33230, 1586, 9943, 16334, 68862, 9011, 14031, 6178, 21225, 1420, 32236, 2099, 2150, 26583, 2784, 8941, 9811, 27444, 50566 or 66428 gene sequences, for expression and accumulation of 140, 1470, 1686, 2089, 2427, 3702, 5891, 6428, 7181, 7660, 25641, 69583, 49863, 8897, 1682, 17667, 9235, 3703, 14171, 10359, 1660, 1450, 18894, 2088, 32427, 2160, 9252, 9389, 1642, 85269, 10297, 1584, 9525, 14124, 4469, 8990, 2100, 9288, 64698, 10480, 20893, 33230, 1586, 9943, 16334, 68862, 9011, 14031, 6178, 21225, 1420, 32236, 2099, 2150, 26583, 2784, 8941, 9811, 27444, 50566 or 66428 mRNA, and for the presence of recombinant 140, 1470, 1686, 2089, 2427, 3702, 5891, 6428, 7181, 7660, 25641, 69583, 49863, 8897, 1682, 17667, 9235, 3703, 14171, 10359, 1660, 1450, 18894, 2088, 32427, 2160, 9252, 9389, 1642, 85269, 10297, 1584, 9525, 14124, 4469, 8990, 2100, 9288, 64698, 10480, 20893, 33230, 1586, 9943, 16334, 68862, 9011, 14031, 6178, 21225, 1420, 32236, 2099, 2150, 26583, 2784, 8941, 9811, 27444, 50566 or 66428 protein production. In instances wherein a decrease in 140, 1470, 1686, 2089, 2427, 3702, 5891, 6428, 7181, 7660, 25641, 69583, 49863, 8897, 1682, 17667, 9235, 3703, 14171, 10359, 1660, 1450, 18894, 2088, 32427, 2160, 9252, 9389, 1642, 85269, 10297, 1584, 9525, 14124, 4469, 8990, 2100, 9288, 64698, 10480, 20893, 33230, 1586, 9943, 16334, 68862, 9011, 14031, 6178, 21225, 1420, 32236, 2099, 2150, 26583, 2784, 8941, 9811, 27444, 50566 or 66428 gene expression is desired, standard techniques may be used to demonstrate whether a decrease in endogenous 140, 1470, 1686, 2089, 2427, 3702, 5891, 6428, 7181, 7660, 25641, 69583, 49863, 8897, 1682, 17667, 9235, 3703, 14171, 10359, 1660, 1450, 18894, 2088, 32427, 2160, 9252, 9389, 1642, 85269, 10297, 1584, 9525, 14124, 4469, 8990, 2100, 9288, 64698, 10480, 20893, 33230, 1586, 9943, 16334, 68862, 9011, 14031, 6178, 21225, 1420, 32236, 2099, 2150, 26583, 2784, 8941, 9811, 27444, 50566 or 66428 gene expression and/or in 140, 1470, 1686, 2089, 2427, 3702, 5891, 6428, 7181, 7660, 25641, 69583, 49863, 8897, 1682, 17667, 9235, 3703, 14171, 10359, 1660, 1450, 18894, 2088, 32427, 2160, 9252, 9389, 1642, 85269, 10297, 1584, 9525, 14124, 4469, 8990, 2100, 9288, 64698, 10480, 20893, 33230, 1586, 9943, 16334, 68862, 9011, 14031, 6178, 21225, 1420, 32236, 2099, 2150, 26583, 2784, 8941, 9811, 27444, 50566 or 66428 protein production is achieved.

[0575] Cellular models for the study of angiogenesis include models of endothelial cell differentiation on Matrigel (Baatout, S. et al. (1996) Rom. J. Intern. Med. 34:263-269; Benelli, R et al. (1999) Int. J. Biol. Markers 14:243-246), embryonic stem cell models of vascular morphogenesis (Doetschman, T. et al. (1993) Hypertension 22:618-629), the culture of microvessel fragments in physiological gels (Hoying, J B et al. (1996) In Vitro Cell Dev. Biol. Anim. 32: 409-419; U.S. Pat. No. 5,976,782), and the treatment of endothelial cells and smooth muscle cells with atherogenic and angiogenic factors including growth factors and cytokines (e.g., IL-1β, PDGF, TNFα, VEGF), homocysteine, and LDL. In vitro angiogenesis models are described in, for example, Black, A F et al. (1999) Cell Biol. Toxicol. 15:81-90.

[0576] Cellular models for the study of tumorigenesis are known in the art, and include cell lines derived from clinical tumors, cells exposed to chemotherapeutic agents, cells exposed to carcinogenic agents, and cell lines with genetic alterations in growth regulatory genes, for example, oncogenes (e.g., ras) and tumor suppressor genes (e.g., p53).

[0577] Predictive Medicine:

[0578] The present invention also pertains to the field of predictive medicine in which diagnostic assays, prognostic assays, and monitoring clinical trials are used for prognostic (predictive) purposes to thereby treat an individual prophylactically. Accordingly, one aspect of the present invention relates to diagnostic assays for determining 140, 1470, 1686, 2089, 2427, 3702, 5891, 6428, 7181, 7660, 25641, 69583, 49863, 8897, 1682, 17667, 9235, 3703, 14171, 10359, 1660, 1450, 18894, 2088, 32427, 2160, 9252, 9389, 1642, 85269, 10297, 1584, 9525, 14124, 4469, 8990, 2100, 9288, 64698, 10480, 20893, 33230, 1586, 9943, 16334, 68862, 9011, 14031, 6178, 21225, 1420, 32236, 2099, 2150, 26583, 2784, 8941, 9811, 27444, 50566 or 66428 protein and/or nucleic acid expression as well as 140, 1470, 1686, 2089, 2427, 3702, 5891, 6428, 7181, 7660, 25641, 69583, 49863, 8897, 1682, 17667, 9235, 3703, 14171, 10359, 1660, 1450, 18894, 2088, 32427, 2160, 9252, 9389, 1642, 85269, 10297, 1584, 9525, 14124, 4469, 8990, 2100, 9288, 64698, 10480, 20893, 33230, 1586, 9943, 16334, 68862, 9011, 14031, 6178, 21225, 1420, 32236, 2099, 2150, 26583, 2784, 8941, 9811, 27444, 50566 or 66428 activity, in the context of a biological sample (e.g., blood, serum, cells, e.g., endothelial cells, or tissue, e.g., vascular tissue, bladder tissue or prostate tissue) to thereby determine whether an individual is afflicted with a predisposition or is experiencing a cancer. The invention also provides for prognostic (or predictive) assays for determining whether an individual is at risk of developing a cancer. For example, mutations in a 140, 1470, 1686, 2089, 2427, 3702, 5891, 6428, 7181, 7660, 25641, 69583, 49863, 8897, 1682, 17667, 9235, 3703, 14171, 10359, 1660, 1450, 18894, 2088, 32427, 2160, 9252, 9389, 1642, 85269, 10297, 1584, 9525, 14124, 4469, 8990, 2100, 9288, 64698, 10480, 20893, 33230, 1586, 9943, 16334, 68862, 9011, 14031, 6178, 21225, 1420, 32236, 2099, 2150, 26583, 2784, 8941, 9811, 27444, 50566 or 66428 gene can be assayed for in a biological sample. Such assays can be used for prognostic or predictive purpose to thereby phophylactically treat an individual prior to the onset of a cancer.

[0579] Another aspect of the invention pertains to monitoring the influence of 140, 1470, 1686, 2089, 2427, 3702, 5891, 6428, 7181, 7660, 25641, 69583, 49863, 8897, 1682, 17667, 9235, 3703, 14171, 10359, 1660, 1450, 18894, 2088, 32427, 2160, 9252, 9389, 1642, 85269, 10297, 1584, 9525, 14124, 4469, 8990, 2100, 9288, 64698, 10480, 20893, 33230, 1586, 9943, 16334, 68862, 9011, 14031, 6178, 21225, 1420, 32236, 2099, 2150, 26583, 2784, 8941, 9811, 27444, 50566 or 66428 modulators (e.g., anti-140, 1470, 1686, 2089, 2427, 3702, 5891, 6428, 7181, 7660, 25641, 69583, 49863, 8897, 1682, 17667, 9235, 3703, 14171, 10359, 1660, 1450, 18894, 2088, 32427, 2160, 9252, 9389, 1642, 85269, 10297, 1584, 9525, 14124, 4469, 8990, 2100, 9288, 64698, 10480, 20893, 33230, 1586, 9943, 16334, 68862, 9011, 14031, 6178, 21225, 1420, 32236, 2099, 2150, 26583, 2784, 8941, 9811, 27444, 50566 or 66428 antibodies or 140, 1470, 1686, 2089, 2427, 3702, 5891, 6428, 7181, 7660, 25641, 69583, 49863, 8897, 1682, 17667, 9235, 3703, 14171, 10359, 1660, 1450, 18894, 2088, 32427, 2160, 9252, 9389, 1642, 85269, 10297, 1584, 9525, 14124, 4469, 8990, 2100, 9288, 64698, 10480, 20893, 33230, 1586, 9943, 16334, 68862, 9011, 14031, 6178, 21225, 1420, 32236, 2099, 2150, 26583, 2784, 8941, 9811, 27444, 50566 or 66428 ribozymes) on the expression or activity of 140, 1470, 1686, 2089, 2427, 3702, 5891, 6428, 7181, 7660, 25641, 69583, 49863, 8897, 1682, 17667, 9235, 3703, 14171, 10359, 1660, 1450, 18894, 2088, 32427, 2160, 9252, 9389, 1642, 85269, 10297, 1584, 9525, 14124, 4469, 8990, 2100, 9288, 64698, 10480, 20893, 33230, 1586, 9943, 16334, 68862, 9011, 14031, 6178, 21225, 1420, 32236, 2099, 2150, 26583, 2784, 8941, 9811, 27444, 50566 or 66428 in clinical trials.

[0580] These and other agents are described in further detail in the following sections.

[0581] Diagnostic Assays

[0582] To determine whether a subject is afflicted with a disease, a biological sample may be obtained from a subject and the biological sample may be contacted with a compound or an agent capable of detecting a 140, 1470, 1686, 2089, 2427, 3702, 5891, 6428, 7181, 7660, 25641, 69583, 49863, 8897, 1682, 17667, 9235, 3703, 14171, 10359, 1660, 1450, 18894, 2088, 32427, 2160, 9252, 9389, 1642, 85269, 10297, 1584, 9525, 14124, 4469, 8990, 2100, 9288, 64698, 10480, 20893, 33230, 1586, 9943, 16334, 68862, 9011, 14031, 6178, 21225, 1420, 32236, 2099, 2150, 26583, 2784, 8941, 9811, 27444, 50566 or 66428 protein or nucleic acid (e.g., mRNA or genomic DNA) that encodes a 140, 1470, 1686, 2089, 2427, 3702, 5891, 6428, 7181, 7660, 25641, 69583, 49863, 8897, 1682, 17667, 9235, 3703, 14171, 10359, 1660, 1450, 18894, 2088, 32427, 2160, 9252, 9389, 1642, 85269, 10297, 1584, 9525, 14124, 4469, 8990, 2100, 9288, 64698, 10480, 20893, 33230, 1586, 9943, 16334, 68862, 9011, 14031, 6178, 21225, 1420, 32236, 2099, 2150, 26583, 2784, 8941, 9811, 27444, 50566 or 66428 protein, in the biological sample. A preferred agent for detecting 140, 1470, 1686, 2089, 2427, 3702, 5891, 6428, 7181, 7660, 25641, 69583, 49863, 8897, 1682, 17667, 9235, 3703, 14171, 10359, 1660, 1450, 18894, 2088, 32427, 2160, 9252, 9389, 1642, 85269, 10297, 1584, 9525, 14124, 4469, 8990, 2100, 9288, 64698, 10480, 20893, 33230, 1586, 9943, 16334, 68862, 9011, 14031, 6178, 21225, 1420, 32236, 2099, 2150, 26583, 2784, 8941, 9811, 27444, 50566 or 66428 mRNA or genomic DNA is a labeled nucleic acid probe capable of hybridizing to 140, 1470, 1686, 2089, 2427, 3702, 5891, 6428, 7181, 7660, 25641, 69583, 49863, 8897, 1682, 17667, 9235, 3703, 14171, 10359, 1660, 1450, 18894, 2088, 32427, 2160, 9252, 9389, 1642, 85269, 10297, 1584, 9525, 14124, 4469, 8990, 2100, 9288, 64698, 10480, 20893, 33230, 1586, 9943, 16334, 68862, 9011, 14031, 6178, 21225, 1420, 32236, 2099, 2150, 26583, 2784, 8941, 9811, 27444, 50566 or 66428 mRNA or genomic DNA. The nucleic acid probe can be, for example, the 140, 1470, 1686, 2089, 2427, 3702, 5891, 6428, 7181, 7660, 25641, 69583, 49863, 8897, 1682, 17667, 9235, 3703, 14171, 10359, 1660, 1450, 18894, 2088, 32427, 2160, 9252, 9389, 1642, 85269, 10297, 1584, 9525, 14124, 4469, 8990, 2100, 9288, 64698, 10480, 20893, 33230, 1586, 9943, 16334, 68862, 9011, 14031, 6178, 21225, 1420, 32236, 2099, 2150, 26583, 2784, 8941, 9811, 27444, 50566 or 66428 nucleic acid set forth in SEQ ID NO:1, 3, 5, 7, 9, 11, 13, 15, 17, 19, 21, 23, 25, 27, 29, 31, 33, 35, 37, 39, 41, 43, 45, 47, 49, 51, 53, 55, 57, 59, 61, 63, 65, 67, 69, 71, 73, 75, 77, 79, 81, 83, 85, 87, 89, 91, 93, 95, 97, 99, 101, 103, 105, 107, 109, 111, 113, 115, 117, 119 or 121, or a portion thereof, such as an oligonucleotide of at least 15, 20, 25, 30, 25, 40, 45, 50, 100, 250 or 500 nucleotides in length and sufficient to specifically hybridize under stringent conditions to 140, 1470, 1686, 2089, 2427, 3702, 5891, 6428, 7181, 7660, 25641, 69583, 49863, 8897, 1682, 17667, 9235, 3703, 14171, 10359, 1660, 1450, 18894, 2088, 32427, 2160, 9252, 9389, 1642, 85269, 10297, 1584, 9525, 14124, 4469, 8990, 2100, 9288, 64698, 10480, 20893, 33230, 1586, 9943, 16334, 68862, 9011, 14031, 6178, 21225, 1420, 32236, 2099, 2150, 26583, 2784, 8941, 9811, 27444, 50566 or 66428 mRNA or genomic DNA. Other suitable probes for use in the diagnostic assays of the invention are described herein.

[0583] A preferred agent for detecting 140, 1470, 1686, 2089, 2427, 3702, 5891, 6428, 7181, 7660, 25641, 69583, 49863, 8897, 1682, 17667, 9235, 3703, 14171, 10359, 1660, 1450, 18894, 2088, 32427, 2160, 9252, 9389, 1642, 85269, 10297, 1584, 9525, 14124, 4469, 8990, 2100, 9288, 64698, 10480, 20893, 33230, 1586, 9943, 16334, 68862, 9011, 14031, 6178, 21225, 1420, 32236, 2099, 2150, 26583, 2784, 8941, 9811, 27444, 50566 or 66428 protein in a sample is an antibody capable of binding to 140, 1470, 1686, 2089, 2427, 3702, 5891, 6428, 7181, 7660, 25641, 69583, 49863, 8897, 1682, 17667, 9235, 3703, 14171, 10359, 1660, 1450, 18894, 2088, 32427, 2160, 9252, 9389, 1642, 85269, 10297, 1584, 9525, 14124, 4469, 8990, 2100, 9288, 64698, 10480, 20893, 33230, 1586, 9943, 16334, 68862, 9011, 14031, 6178, 21225, 1420, 32236, 2099, 2150, 26583, 2784, 8941, 9811, 27444, 50566 or 66428 protein, preferably an antibody with a detectable label. Antibodies can be polyclonal, or more preferably, monoclonal. An intact antibody, or a fragment thereof (e.g., Fab or F(ab′)2) can be used. The term “labeled”, with regard to the probe or antibody, is intended to encompass direct labeling of the probe or antibody by coupling (i.e., physically linking) a detectable substance to the probe or antibody, as well as indirect labeling of the probe or antibody by reactivity with another reagent that is directly labeled. Examples of indirect labeling include detection of a primary antibody using a fluorescently labeled secondary antibody and end-labeling of a DNA probe with biotin such that it can be detected with fluorescently labeled streptavidin.

[0584] The term “biological sample” is intended to include tissues, cells, and biological fluids isolated from a subject, as well as tissues, cells, and fluids present within a subject. That is, the detection method of the invention can be used to detect 140, 1470, 1686, 2089, 2427, 3702, 5891, 6428, 7181, 7660, 25641, 69583, 49863, 8897, 1682, 17667, 9235, 3703, 14171, 10359, 1660, 1450, 18894, 2088, 32427, 2160, 9252, 9389, 1642, 85269, 10297, 1584, 9525, 14124, 4469, 8990, 2100, 9288, 64698, 10480, 20893, 33230, 1586, 9943, 16334, 68862, 9011, 14031, 6178, 21225, 1420, 32236, 2099, 2150, 26583, 2784, 8941, 9811, 27444, 50566 or 66428 mRNA, protein, or genomic DNA in a biological sample in vitro as well as in vivo. For example, in vitro techniques for detection of 140, 1470, 1686, 2089, 2427, 3702, 5891, 6428, 7181, 7660, 25641, 69583, 49863, 8897, 1682, 17667, 9235, 3703, 14171, 10359, 1660, 1450, 18894, 2088, 32427, 2160, 9252, 9389, 1642, 85269, 10297, 1584, 9525, 14124, 4469, 8990, 2100, 9288, 64698, 10480, 20893, 33230, 1586, 9943, 16334, 68862, 9011, 14031, 6178, 21225, 1420, 32236, 2099, 2150, 26583, 2784, 8941, 9811, 27444, 50566 or 66428 mRNA include Northern hybridizations and in situ hybridizations. In vitro techniques for detection of 140, 1470, 1686, 2089, 2427, 3702, 5891, 6428, 7181, 7660, 25641, 69583, 49863, 8897, 1682, 17667, 9235, 3703, 14171, 10359, 1660, 1450, 18894, 2088, 32427, 2160, 9252, 9389, 1642, 85269, 10297, 1584, 9525, 14124, 4469, 8990, 2100, 9288, 64698, 10480, 20893, 33230, 1586, 9943, 16334, 68862, 9011, 14031, 6178, 21225, 1420, 32236, 2099, 2150, 26583, 2784, 8941, 9811, 27444, 50566 or 66428 protein include enzyme linked immunosorbent assays (ELISAs), Western blots, immunoprecipitations and immunofluorescence. In vitro techniques for detection of 140, 1470, 1686, 2089, 2427, 3702, 5891, 6428, 7181, 7660, 25641, 69583, 49863, 8897, 1682, 17667, 9235, 3703, 14171, 10359, 1660, 1450, 18894, 2088, 32427, 2160, 9252, 9389, 1642, 85269, 10297, 1584, 9525, 14124, 4469, 8990, 2100, 9288, 64698, 10480, 20893, 33230, 1586, 9943, 16334, 68862, 9011, 14031, 6178, 21225, 1420, 32236, 2099, 2150, 26583, 2784, 8941, 9811, 27444, 50566 or 66428 genomic DNA include Southern hybridizations. Furthermore, in vivo techniques for detection of 140, 1470, 1686, 2089, 2427, 3702, 5891, 6428, 7181, 7660, 25641, 69583, 49863, 8897, 1682, 17667, 9235, 3703, 14171, 10359, 1660, 1450, 18894, 2088, 32427, 2160, 9252, 9389, 1642, 85269, 10297, 1584, 9525, 14124, 4469, 8990, 2100, 9288, 64698, 10480, 20893, 33230, 1586, 9943, 16334, 68862, 9011, 14031, 6178, 21225, 1420, 32236, 2099, 2150, 26583, 2784, 8941, 9811, 27444, 50566 or 66428 protein include introducing into a subject a labeled anti-140, 1470, 1686, 2089, 2427, 3702, 5891, 6428, 7181, 7660, 25641, 69583, 49863, 8897, 1682, 17667, 9235, 3703, 14171, 10359, 1660, 1450, 18894, 2088, 32427, 2160, 9252, 9389, 1642, 85269, 10297, 1584, 9525, 14124, 4469, 8990, 2100, 9288, 64698, 10480, 20893, 33230, 1586, 9943, 16334, 68862, 9011, 14031, 6178, 21225, 1420, 32236, 2099, 2150, 26583, 2784, 8941, 9811, 27444, 50566 or 66428 antibody. For example, the antibody can be labeled with a radioactive marker whose presence and location in a subject can be detected by standard imaging techniques.

[0585] In another embodiment, the methods further involve obtaining a control biological sample from a control subject, contacting the control sample with a compound or agent capable of detecting 140, 1470, 1686, 2089, 2427, 3702, 5891, 6428, 7181, 7660, 25641, 69583, 49863, 8897, 1682, 17667, 9235, 3703, 14171, 10359, 1660, 1450, 18894, 2088, 32427, 2160, 9252, 9389, 1642, 85269, 10297, 1584, 9525, 14124, 4469, 8990, 2100, 9288, 64698, 10480, 20893, 33230, 1586, 9943, 16334, 68862, 9011, 14031, 6178, 21225, 1420, 32236, 2099, 2150, 26583, 2784, 8941, 9811, 27444, 50566 or 66428 protein, mRNA, or genomic DNA, such that the presence of 140, 1470, 1686, 2089, 2427, 3702, 5891, 6428, 7181, 7660, 25641, 69583, 49863, 8897, 1682, 17667, 9235, 3703, 14171, 10359, 1660, 1450, 18894, 2088, 32427, 2160, 9252, 9389, 1642, 85269, 10297, 1584, 9525, 14124, 4469, 8990, 2100, 9288, 64698, 10480, 20893, 33230, 1586, 9943, 16334, 68862, 9011, 14031, 6178, 21225, 1420, 32236, 2099, 2150, 26583, 2784, 8941, 9811, 27444, 50566 or 66428 protein, mRNA or genomic DNA is detected in the biological sample, and comparing the presence of 140, 1470, 1686, 2089, 2427, 3702, 5891, 6428, 7181, 7660, 25641, 69583, 49863, 8897, 1682, 17667, 9235, 3703, 14171, 10359, 1660, 1450, 18894, 2088, 32427, 2160, 9252, 9389, 1642, 85269, 10297, 1584, 9525, 14124, 4469, 8990, 2100, 9288, 64698, 10480, 20893, 33230, 1586, 9943, 16334, 68862, 9011, 14031, 6178, 21225, 1420, 32236, 2099, 2150, 26583, 2784, 8941, 9811, 27444, 50566 or 66428 protein, mRNA or genomic DNA in the control sample with the presence of 140, 1470, 1686, 2089, 2427, 3702, 5891, 6428, 7181, 7660, 25641, 69583, 49863, 8897, 1682, 17667, 9235, 3703, 14171, 10359, 1660, 1450, 18894, 2088, 32427, 2160, 9252, 9389, 1642, 85269, 10297, 1584, 9525, 14124, 4469, 8990, 2100, 9288, 64698, 10480, 20893, 33230, 1586, 9943, 16334, 68862, 9011, 14031, 6178, 21225, 1420, 32236, 2099, 2150, 26583, 2784, 8941, 9811, 27444, 50566 or 66428 protein, mRNA or genomic DNA in the test sample.

[0586] Prognostic Assays

[0587] The present invention further pertains to methods for identifying subjects having or at risk of developing a disease associated with aberrant 140, 1470, 1686, 2089, 2427, 3702, 5891, 6428, 7181, 7660, 25641, 69583, 49863, 8897, 1682, 17667, 9235, 3703, 14171, 10359, 1660, 1450, 18894, 2088, 32427, 2160, 9252, 9389, 1642, 85269, 10297, 1584, 9525, 14124, 4469, 8990, 2100, 9288, 64698, 10480, 20893, 33230, 1586, 9943, 16334, 68862, 9011, 14031, 6178, 21225, 1420, 32236, 2099, 2150, 26583, 2784, 8941, 9811, 27444, 50566 or 66428 expression or activity.

[0588] As used herein, the term “aberrant” includes a 140, 1470, 1686, 2089, 2427, 3702, 5891, 6428, 7181, 7660, 25641, 69583, 49863, 8897, 1682, 17667, 9235, 3703, 14171, 10359, 1660, 1450, 18894, 2088, 32427, 2160, 9252, 9389, 1642, 85269, 10297, 1584, 9525, 14124, 4469, 8990, 2100, 9288, 64698, 10480, 20893, 33230, 1586, 9943, 16334, 68862, 9011, 14031, 6178, 21225, 1420, 32236, 2099, 2150, 26583, 2784, 8941, 9811, 27444, 50566 or 66428 expression or activity which deviates from the wild type 140, 1470, 1686, 2089, 2427, 3702, 5891, 6428, 7181, 7660, 25641, 69583, 49863, 8897, 1682, 17667, 9235, 3703, 14171, 10359, 1660, 1450, 18894, 2088, 32427, 2160, 9252, 9389, 1642, 85269, 10297, 1584, 9525, 14124, 4469, 8990, 2100, 9288, 64698, 10480, 20893, 33230, 1586, 9943, 16334, 68862, 9011, 14031, 6178, 21225, 1420, 32236, 2099, 2150, 26583, 2784, 8941, 9811, 27444, 50566 or 66428 expression or activity. Aberrant expression or activity includes increased or decreased expression or activity, as well as expression or activity which does not follow the wild type developmental pattern of expression or the subcellular pattern of expression. For example, aberrant 140, 1470, 1686, 2089, 2427, 3702, 5891, 6428, 7181, 7660, 25641, 69583, 49863, 8897, 1682, 17667, 9235, 3703, 14171, 10359, 1660, 1450, 18894, 2088, 32427, 2160, 9252, 9389, 1642, 85269, 10297, 1584, 9525, 14124, 4469, 8990, 2100, 9288, 64698, 10480, 20893, 33230, 1586, 9943, 16334, 68862, 9011, 14031, 6178, 21225, 1420, 32236, 2099, 2150, 26583, 2784, 8941, 9811, 27444, 50566 or 66428 expression or activity is intended to include the cases in which a mutation in the 140, 1470, 1686, 2089, 2427, 3702, 5891, 6428, 7181, 7660, 25641, 69583, 49863, 8897, 1682, 17667, 9235, 3703, 14171, 10359, 1660, 1450, 18894, 2088, 32427, 2160, 9252, 9389, 1642, 85269, 10297, 1584, 9525, 14124, 4469, 8990, 2100, 9288, 64698, 10480, 20893, 33230, 1586, 9943, 16334, 68862, 9011, 14031, 6178, 21225, 1420, 32236, 2099, 2150, 26583, 2784, 8941, 9811, 27444, 50566 or 66428 gene causes the 140, 1470, 1686, 2089, 2427, 3702, 5891, 6428, 7181, 7660, 25641, 69583, 49863, 8897, 1682, 17667, 9235, 3703, 14171, 10359, 1660, 1450, 18894, 2088, 32427, 2160, 9252, 9389, 1642, 85269, 10297, 1584, 9525, 14124, 4469, 8990, 2100, 9288, 64698, 10480, 20893, 33230, 1586, 9943, 16334, 68862, 9011, 14031, 6178, 21225, 1420, 32236, 2099, 2150, 26583, 2784, 8941, 9811, 27444, 50566 or 66428 gene to be under-expressed or over-expressed and situations in which such mutations result in a non-functional 140, 1470, 1686, 2089, 2427, 3702, 5891, 6428, 7181, 7660, 25641, 69583, 49863, 8897, 1682, 17667, 9235, 3703, 14171, 10359, 1660, 1450, 18894, 2088, 32427, 2160, 9252, 9389, 1642, 85269, 10297, 1584, 9525, 14124, 4469, 8990, 2100, 9288, 64698, 10480, 20893, 33230, 1586, 9943, 16334, 68862, 9011, 14031, 6178, 21225, 1420, 32236, 2099, 2150, 26583, 2784, 8941, 9811, 27444, 50566 or 66428 protein or a protein which does not function in a wild-type fashion, e.g., a protein which does not interact with a 140, 1470, 1686, 2089, 2427, 3702, 5891, 6428, 7181, 7660, 25641, 69583, 49863, 8897, 1682, 17667, 9235, 3703, 14171, 10359, 1660, 1450, 18894, 2088, 32427, 2160, 9252, 9389, 1642, 85269, 10297, 1584, 9525, 14124, 4469, 8990, 2100, 9288, 64698, 10480, 20893, 33230, 1586, 9943, 16334, 68862, 9011, 14031, 6178, 21225, 1420, 32236, 2099, 2150, 26583, 2784, 8941, 9811, 27444, 50566 or 66428 substrate, or one which interacts with a non-140, 1470, 1686, 2089, 2427, 3702, 5891, 6428, 7181, 7660, 25641, 69583, 49863, 8897, 1682, 17667, 9235, 3703, 14171, 10359, 1660, 1450, 18894, 2088, 32427, 2160, 9252, 9389, 1642, 85269, 10297, 1584, 9525, 14124, 4469, 8990, 2100, 9288, 64698, 10480, 20893, 33230, 1586, 9943, 16334, 68862, 9011, 14031, 6178, 21225, 1420, 32236, 2099, 2150, 26583, 2784, 8941, 9811, 27444, 50566 or 66428 substrate.

[0589] The assays described herein, such as the preceding diagnostic assays or the following assays, can be used to identify a subject having or at risk of developing a disease. A biological sample may be obtained from a subject and tested for the presence or absence of a genetic alteration. For example, such genetic alterations can be detected by ascertaining the existence of at least one of 1) a deletion of one or more nucleotides from a 140, 1470, 1686, 2089, 2427, 3702, 5891, 6428, 7181, 7660, 25641, 69583, 49863, 8897, 1682, 17667, 9235, 3703, 14171, 10359, 1660, 1450, 18894, 2088, 32427, 2160, 9252, 9389, 1642, 85269, 10297, 1584, 9525, 14124, 4469, 8990, 2100, 9288, 64698, 10480, 20893, 33230, 1586, 9943, 16334, 68862, 9011, 14031, 6178, 21225, 1420, 32236, 2099, 2150, 26583, 2784, 8941, 9811, 27444, 50566 or 66428 gene, 2) an addition of one or more nucleotides to a 140, 1470, 1686, 2089, 2427, 3702, 5891, 6428, 7181, 7660, 25641, 69583, 49863, 8897, 1682, 17667, 9235, 3703, 14171, 10359, 1660, 1450, 18894, 2088, 32427, 2160, 9252, 9389, 1642, 85269, 10297, 1584, 9525, 14124, 4469, 8990, 2100, 9288, 64698, 10480, 20893, 33230, 1586, 9943, 16334, 68862, 9011, 14031, 6178, 21225, 1420, 32236, 2099, 2150, 26583, 2784, 8941, 9811, 27444, 50566 or 66428 gene, 3) a substitution of one or more nucleotides of a 140, 1470, 1686, 2089, 2427, 3702, 5891, 6428, 7181, 7660, 25641, 69583, 49863, 8897, 1682, 17667, 9235, 3703, 14171, 10359, 1660, 1450, 18894, 2088, 32427, 2160, 9252, 9389, 1642, 85269, 10297, 1584, 9525, 14124, 4469, 8990, 2100, 9288, 64698, 10480, 20893, 33230, 1586, 9943, 16334, 68862, 9011, 14031, 6178, 21225, 1420, 32236, 2099, 2150, 26583, 2784, 8941, 9811, 27444, 50566 or 66428 gene, 4) a chromosomal rearrangement of a 140, 1470, 1686, 2089, 2427, 3702, 5891, 6428, 7181, 7660, 25641, 69583, 49863, 8897, 1682, 17667, 9235, 3703, 14171, 10359, 1660, 1450, 18894, 2088, 32427, 2160, 9252, 9389, 1642, 85269, 10297, 1584, 9525, 14124, 4469, 8990, 2100, 9288, 64698, 10480, 20893, 33230, 1586, 9943, 16334, 68862, 9011, 14031, 6178, 21225, 1420, 32236, 2099, 2150, 26583, 2784, 8941, 9811, 27444, 50566 or 66428 gene, 5) an alteration in the level of a messenger RNA transcript of a 140, 1470, 1686, 2089, 2427, 3702, 5891, 6428, 7181, 7660, 25641, 69583, 49863, 8897, 1682, 17667, 9235, 3703, 14171, 10359, 1660, 1450, 18894, 2088, 32427, 2160, 9252, 9389, 1642, 85269, 10297, 1584, 9525, 14124, 4469, 8990, 2100, 9288, 64698, 10480, 20893, 33230, 1586, 9943, 16334, 68862, 9011, 14031, 6178, 21225, 1420, 32236, 2099, 2150, 26583, 2784, 8941, 9811, 27444, 50566 or 66428 gene, 6) aberrant modification of a 140, 1470, 1686, 2089, 2427, 3702, 5891, 6428, 7181, 7660, 25641, 69583, 49863, 8897, 1682, 17667, 9235, 3703, 14171, 10359, 1660, 1450, 18894, 2088, 32427, 2160, 9252, 9389, 1642, 85269, 10297, 1584, 9525, 14124, 4469, 8990, 2100, 9288, 64698, 10480, 20893, 33230, 1586, 9943, 16334, 68862, 9011, 14031, 6178, 21225, 1420, 32236, 2099, 2150, 26583, 2784, 8941, 9811, 27444, 50566 or 66428 gene, such as of the methylation pattern of the genomic DNA, 7) the presence of a non-wild type splicing pattern of a messenger RNA transcript of a 140, 1470, 1686, 2089, 2427, 3702, 5891, 6428, 7181, 7660, 25641, 69583, 49863, 8897, 1682, 17667, 9235, 3703, 14171, 10359, 1660, 1450, 18894, 2088, 32427, 2160, 9252, 9389, 1642, 85269, 10297, 1584, 9525, 14124, 4469, 8990, 2100, 9288, 64698, 10480, 20893, 33230, 1586, 9943, 16334, 68862, 9011, 14031, 6178, 21225, 1420, 32236, 2099, 2150, 26583, 2784, 8941, 9811, 27444, 50566 or 66428 gene, 8) a non-wild type level of a 140, 1470, 1686, 2089, 2427, 3702, 5891, 6428, 7181, 7660, 25641, 69583, 49863, 8897, 1682, 17667, 9235, 3703, 14171, 10359, 1660, 1450, 18894, 2088, 32427, 2160, 9252, 9389, 1642, 85269, 10297, 1584, 9525, 14124, 4469, 8990, 2100, 9288, 64698, 10480, 20893, 33230, 1586, 9943, 16334, 68862, 9011, 14031, 6178, 21225, 1420, 32236, 2099, 2150, 26583, 2784, 8941, 9811, 27444, 50566 or 66428-protein, 9) allelic loss of a 140, 1470, 1686, 2089, 2427, 3702, 5891, 6428, 7181, 7660, 25641, 69583, 49863, 8897, 1682, 17667, 9235, 3703, 14171, 10359, 1660, 1450, 18894, 2088, 32427, 2160, 9252, 9389, 1642, 85269, 10297, 1584, 9525, 14124, 4469, 8990, 2100, 9288, 64698, 10480, 20893, 33230, 1586, 9943, 16334, 68862, 9011, 14031, 6178, 21225, 1420, 32236, 2099, 2150, 26583, 2784, 8941, 9811, 27444, 50566 or 66428 gene, and 10) inappropriate post-translational modification of a 140, 1470, 1686, 2089, 2427, 3702, 5891, 6428, 7181, 7660, 25641, 69583, 49863, 8897, 1682, 17667, 9235, 3703, 14171, 10359, 1660, 1450, 18894, 2088, 32427, 2160, 9252, 9389, 1642, 85269, 10297, 1584, 9525, 14124, 4469, 8990, 2100, 9288, 64698, 10480, 20893, 33230, 1586, 9943, 16334, 68862, 9011, 14031, 6178, 21225, 1420, 32236, 2099, 2150, 26583, 2784, 8941, 9811, 27444, 50566 or 66428-protein.

[0590] As described herein, there are a large number of assays known in the art which can be used for detecting genetic alterations in a 140, 1470, 1686, 2089, 2427, 3702, 5891, 6428, 7181, 7660, 25641, 69583, 49863, 8897, 1682, 17667, 9235, 3703, 14171, 10359, 1660, 1450, 18894, 2088, 32427, 2160, 9252, 9389, 1642, 85269, 10297, 1584, 9525, 14124, 4469, 8990, 2100, 9288, 64698, 10480, 20893, 33230, 1586, 9943, 16334, 68862, 9011, 14031, 6178, 21225, 1420, 32236, 2099, 2150, 26583, 2784, 8941, 9811, 27444, 50566 or 66428 gene. For example, a genetic alteration in a 140, 1470, 1686, 2089, 2427, 3702, 5891, 6428, 7181, 7660, 25641, 69583, 49863, 8897, 1682, 17667, 9235, 3703, 14171, 10359, 1660, 1450, 18894, 2088, 32427, 2160, 9252, 9389, 1642, 85269, 10297, 1584, 9525, 14124, 4469, 8990, 2100, 9288, 64698, 10480, 20893, 33230, 1586, 9943, 16334, 68862, 9011, 14031, 6178, 21225, 1420, 32236, 2099, 2150, 26583, 2784, 8941, 9811, 27444, 50566 or 66428 gene may be detected using a probe/primer in a polymerase chain reaction (PCR) (see, e.g., U.S. Pat. Nos. 4,683,195 and 4,683,202), such as anchor PCR or RACE PCR, or, alternatively, in a ligation chain reaction (LCR) (see, e.g., Landegran et al. (1988) Science 241:1077-1080; and Nakazawa et al. (1994) Proc. Natl. Acad. Sci. USA 91:360-364), the latter of which can be particularly useful for detecting point mutations in a 140, 1470, 1686, 2089, 2427, 3702, 5891, 6428, 7181, 7660, 25641, 69583, 49863, 8897, 1682, 17667, 9235, 3703, 14171, 10359, 1660, 1450, 18894, 2088, 32427, 2160, 9252, 9389, 1642, 85269, 10297, 1584, 9525, 14124, 4469, 8990, 2100, 9288, 64698, 10480, 20893, 33230, 1586, 9943, 16334, 68862, 9011, 14031, 6178, 21225, 1420, 32236, 2099, 2150, 26583, 2784, 8941, 9811, 27444, 50566 or 66428 gene (see Abravaya et al. (1995) Nucleic Acids Res. 23:675-682). This method includes collecting a biological sample from a subject, isolating nucleic acid (e.g., genomic DNA, mRNA or both) from the sample, contacting the nucleic acid sample with one or more primers which specifically hybridize to a 140, 1470, 1686, 2089, 2427, 3702, 5891, 6428, 7181, 7660, 25641, 69583, 49863, 8897, 1682, 17667, 9235, 3703, 14171, 10359, 1660, 1450, 18894, 2088, 32427, 2160, 9252, 9389, 1642, 85269, 10297, 1584, 9525, 14124, 4469, 8990, 2100, 9288, 64698, 10480, 20893, 33230, 1586, 9943, 16334, 68862, 9011, 14031, 6178, 21225, 1420, 32236, 2099, 2150, 26583, 2784, 8941, 9811, 27444, 50566 or 66428 gene under conditions such that hybridization and amplification of the 140, 1470, 1686, 2089, 2427, 3702, 5891, 6428, 7181, 7660, 25641, 69583, 49863, 8897, 1682, 17667, 9235, 3703, 14171, 10359, 1660, 1450, 18894, 2088, 32427, 2160, 9252, 9389, 1642, 85269, 10297, 1584, 9525, 14124, 4469, 8990, 2100, 9288, 64698, 10480, 20893, 33230, 1586, 9943, 16334, 68862, 9011, 14031, 6178, 21225, 1420, 32236, 2099, 2150, 26583, 2784, 8941, 9811, 27444, 50566 or 66428 gene (if present) occurs, and detecting the presence or absence of an amplification product, or detecting the size of the amplification product and comparing the length to a control sample. It is anticipated that PCR and/or LCR may be desirable to use as a preliminary amplification step in conjunction with any of the techniques used for detecting mutations described herein.

[0591] Alternative amplification methods include: self sustained sequence replication (Guatelli, J. C. et al. (1990) Proc. Natl. Acad. Sci. USA 87:1874-1878), transcriptional amplification system (Kwoh, D. Y. et al. (1989) Proc. Natl. Acad. Sci. USA 86:1173-1177), Q-Beta Replicase (Lizardi, P. M. et al. (1988) Bio-Technology 6:1197), or any other nucleic acid amplification method, followed by the detection of the amplified molecules using techniques well known to those of skill in the art. These detection schemes are especially useful for the detection of nucleic acid molecules if such molecules are present in very low numbers.

[0592] In an alternative embodiment, mutations in a 140, 1470, 1686, 2089, 2427, 3702, 5891, 6428, 7181, 7660, 25641, 69583, 49863, 8897, 1682, 17667, 9235, 3703, 14171, 10359, 1660, 1450, 18894, 2088, 32427, 2160, 9252, 9389, 1642, 85269, 10297, 1584, 9525, 14124, 4469, 8990, 2100, 9288, 64698, 10480, 20893, 33230, 1586, 9943, 16334, 68862, 9011, 14031, 6178, 21225, 1420, 32236, 2099, 2150, 26583, 2784, 8941, 9811, 27444, 50566 or 66428 gene from a biological sample can be identified by alterations in restriction enzyme cleavage patterns. For example, sample and control DNA is isolated, amplified (optionally), digested with one or more restriction endonucleases, and fragment length sizes are determined by gel electrophoresis and compared. Differences in fragment length sizes between sample and control DNA indicates mutations in the sample DNA. Moreover, the use of sequence specific ribozymes (see, for example, U.S. Pat. No. 5,498,531) can be used to score for the presence of specific mutations by development or loss of a ribozyme cleavage site.

[0593] In other embodiments, genetic mutations in 140, 1470, 1686, 2089, 2427, 3702, 5891, 6428, 7181, 7660, 25641, 69583, 49863, 8897, 1682, 17667, 9235, 3703, 14171, 10359, 1660, 1450, 18894, 2088, 32427, 2160, 9252, 9389, 1642, 85269, 10297, 1584, 9525, 14124, 4469, 8990, 2100, 9288, 64698, 10480, 20893, 33230, 1586, 9943, 16334, 68862, 9011, 14031, 6178, 21225, 1420, 32236, 2099, 2150, 26583, 2784, 8941, 9811, 27444, 50566 or 66428 can be identified by hybridizing biological sample derived and control nucleic acids, e.g., DNA or RNA, to high density arrays containing hundreds or thousands of oligonucleotide probes (Cronin, M. T. et al. (1996) Human Mutation 7:244-255; Kozal, M. J. et al. (1996) Nature Medicine 2:753-759). For example, genetic mutations in 140, 1470, 1686, 2089, 2427, 3702, 5891, 6428, 7181, 7660, 25641, 69583, 49863, 8897, 1682, 17667, 9235, 3703, 14171, 10359, 1660, 1450, 18894, 2088, 32427, 2160, 9252, 9389, 1642, 85269, 10297, 1584, 9525, 14124, 4469, 8990, 2100, 9288, 64698, 10480, 20893, 33230, 1586, 9943, 16334, 68862, 9011, 14031, 6178, 21225, 1420, 32236, 2099, 2150, 26583, 2784, 8941, 9811, 27444, 50566 or 66428 can be identified in two dimensional arrays containing light-generated DNA probes as described in Cronin, M. T. et al. (1996) supra. Briefly, a first hybridization array of probes can be used to scan through long stretches of DNA in a sample and control to identify base changes between the sequences by making linear arrays of sequential, overlapping probes. This step allows for the identification of point mutations. This step is followed by a second hybridization array that allows for the characterization of specific mutations by using smaller, specialized probe arrays complementary to all variants or mutations detected. Each mutation array is composed of parallel probe sets, one complementary to the wild-type gene and the other complementary to the mutant gene.

[0594] In yet another embodiment, any of a variety of sequencing reactions known in the art can be used to directly sequence the 140, 1470, 1686, 2089, 2427, 3702, 5891, 6428, 7181, 7660, 25641, 69583, 49863, 8897, 1682, 17667, 9235, 3703, 14171, 10359, 1660, 1450, 18894, 2088, 32427, 2160, 9252, 9389, 1642, 85269, 10297, 1584, 9525, 14124, 4469, 8990, 2100, 9288, 64698, 10480, 20893, 33230, 1586, 9943, 16334, 68862, 9011, 14031, 6178, 21225, 1420, 32236, 2099, 2150, 26583, 2784, 8941, 9811, 27444, 50566 or 66428 gene in a biological sample and detect mutations by comparing the sequence of the 140, 1470, 1686, 2089, 2427, 3702, 5891, 6428, 7181, 7660, 25641, 69583, 49863, 8897, 1682, 17667, 9235, 3703, 14171, 10359, 1660, 1450, 18894, 2088, 32427, 2160, 9252, 9389, 1642, 85269, 10297, 1584, 9525, 14124, 4469, 8990, 2100, 9288, 64698, 10480, 20893, 33230, 1586, 9943, 16334, 68862, 9011, 14031, 6178, 21225, 1420, 32236, 2099, 2150, 26583, 2784, 8941, 9811, 27444, 50566 or 66428 in the biological sample with the corresponding wild-type (control) sequence. Examples of sequencing reactions include those based on techniques developed by Maxam and Gilbert (1977) Proc. Natl. Acad. Sci. USA 74:560) or Sanger (1977) Proc. Natl. Acad. Sci. USA 74:5463). It is also contemplated that any of a variety of automated sequencing procedures can be utilized when performing the diagnostic assays (Naeve, C. W. (1995) Biotechniques 19:448-53), including sequencing by mass spectrometry (see, e.g., PCT International Publication No. WO 94/16101; Cohen et al. (1996) Adv. Chromatogr. 36:127-162; and Griffin et al. (1993) Appl. Biochem. Biotechnol. 38:147-159).

[0595] Other methods for detecting mutations in the 140, 1470, 1686, 2089, 2427, 3702, 5891, 6428, 7181, 7660, 25641, 69583, 49863, 8897, 1682, 17667, 9235, 3703, 14171, 10359, 1660, 1450, 18894, 2088, 32427, 2160, 9252, 9389, 1642, 85269, 10297, 1584, 9525, 14124, 4469, 8990, 2100, 9288, 64698, 10480, 20893, 33230, 1586, 9943, 16334, 68862, 9011, 14031, 6178, 21225, 1420, 32236, 2099, 2150, 26583, 2784, 8941, 9811, 27444, 50566 or 66428 gene include methods in which protection from cleavage agents is used to detect mismatched bases in RNA/RNA or RNA/DNA heteroduplexes (Myers et al. (1985) Science 230:1242). In general, the art technique of “mismatch cleavage” starts by providing heteroduplexes formed by hybridizing (labeled) RNA or DNA containing the wild-type 140, 1470, 1686, 2089, 2427, 3702, 5891, 6428, 7181, 7660, 25641, 69583, 49863, 8897, 1682, 17667, 9235, 3703, 14171, 10359, 1660, 1450, 18894, 2088, 32427, 2160, 9252, 9389, 1642, 85269, 10297, 1584, 9525, 14124, 4469, 8990, 2100, 9288, 64698, 10480, 20893, 33230, 1586, 9943, 16334, 68862, 9011, 14031, 6178, 21225, 1420, 32236, 2099, 2150, 26583, 2784, 8941, 9811, 27444, 50566 or 66428 sequence with potentially mutant RNA or DNA obtained from a tissue sample. The double-stranded duplexes are treated with an agent which cleaves single-stranded regions of the duplex such as which will exist due to basepair mismatches between the control and sample strands. For instance, RNA/DNA duplexes can be treated with RNase and DNA/DNA hybrids treated with S1 nuclease to enzymatically digest the mismatched regions. In other embodiments, either DNA/DNA or RNA/DNA duplexes can be treated with hydroxylamine or osmium tetroxide and with piperidine in order to digest mismatched regions. After digestion of the mismatched regions, the resulting material is then separated by size on denaturing polyacrylamide gels to determine the site of mutation. See, for example, Cotton et al. (1988) Proc. Natl Acad Sci USA 85:4397 and Saleeba et al. (1992) Methods Enzymol. 217:286-295. In a preferred embodiment, the control DNA or RNA can be labeled for detection.

[0596] In still another embodiment, the mismatch cleavage reaction employs one or more proteins that recognize mismatched base pairs in double-stranded DNA (so called “DNA mismatch repair” enzymes) in defined systems for detecting and mapping point mutations in 140, 1470, 1686, 2089, 2427, 3702, 5891, 6428, 7181, 7660, 25641, 69583, 49863, 8897, 1682, 17667, 9235, 3703, 14171, 10359, 1660, 1450, 18894, 2088, 32427, 2160, 9252, 9389, 1642, 85269, 10297, 1584, 9525, 14124, 4469, 8990, 2100, 9288, 64698, 10480, 20893, 33230, 1586, 9943, 16334, 68862, 9011, 14031, 6178, 21225, 1420, 32236, 2099, 2150, 26583, 2784, 8941, 9811, 27444, 50566 or 66428 cDNAs obtained from samples of cells. For example, the mutY enzyme of E. coli cleaves A at G/A mismatches and the thymidine DNA glycosylase from HeLa cells cleaves T at G/T mismatches (Hsu et al. (1994) Carcinogenesis 15:1657-1662). According to an exemplary embodiment, a probe based on a 140, 1470, 1686, 2089, 2427, 3702, 5891, 6428, 7181, 7660, 25641, 69583, 49863, 8897, 1682, 17667, 9235, 3703, 14171, 10359, 1660, 1450, 18894, 2088, 32427, 2160, 9252, 9389, 1642, 85269, 10297, 1584, 9525, 14124, 4469, 8990, 2100, 9288, 64698, 10480, 20893, 33230, 1586, 9943, 16334, 68862, 9011, 14031, 6178, 21225, 1420, 32236, 2099, 2150, 26583, 2784, 8941, 9811, 27444, 50566 or 66428 sequence, e.g., a wild-type 140, 1470, 1686, 2089, 2427, 3702, 5891, 6428, 7181, 7660, 25641, 69583, 49863, 8897, 1682, 17667, 9235, 3703, 14171, 10359, 1660, 1450, 18894, 2088, 32427, 2160, 9252, 9389, 1642, 85269, 10297, 1584, 9525, 14124, 4469, 8990, 2100, 9288, 64698, 10480, 20893, 33230, 1586, 9943, 16334, 68862, 9011, 14031, 6178, 21225, 1420, 32236, 2099, 2150, 26583, 2784, 8941, 9811, 27444, 50566 or 66428 sequence, is hybridized to a cDNA or other DNA product from a test cell(s). The duplex is treated with a DNA mismatch repair enzyme, and the cleavage products, if any, can be detected from electrophoresis protocols or the like. See, for example, U.S. Pat. No. 5,459,039.

[0597] In other embodiments, alterations in electrophoretic mobility will be used to identify mutations in 140, 1470, 1686, 2089, 2427, 3702, 5891, 6428, 7181, 7660, 25641, 69583, 49863, 8897, 1682, 17667, 9235, 3703, 14171, 10359, 1660, 1450, 18894, 2088, 32427, 2160, 9252, 9389, 1642, 85269, 10297, 1584, 9525, 14124, 4469, 8990, 2100, 9288, 64698, 10480, 20893, 33230, 1586, 9943, 16334, 68862, 9011, 14031, 6178, 21225, 1420, 32236, 2099, 2150, 26583, 2784, 8941, 9811, 27444, 50566 or 66428 genes. For example, single strand conformation polymorphism (SSCP) may be used to detect differences in electrophoretic mobility between mutant and wild type nucleic acids (Orita et al. (1989) Proc Natl. Acad. Sci USA: 86:2766; see also Cotton (1993) Mutat. Res. 285:125-144 and Hayashi (1992) Genet. Anal. Tech. Appl. 9:73-79). Single-stranded DNA fragments of sample and control 140, 1470, 1686, 2089, 2427, 3702, 5891, 6428, 7181, 7660, 25641, 69583, 49863, 8897, 1682, 17667, 9235, 3703, 14171, 10359, 1660, 1450, 18894, 2088, 32427, 2160, 9252, 9389, 1642, 85269, 10297, 1584, 9525, 14124, 4469, 8990, 2100, 9288, 64698, 10480, 20893, 33230, 1586, 9943, 16334, 68862, 9011, 14031, 6178, 21225, 1420, 32236, 2099, 2150, 26583, 2784, 8941, 9811, 27444, 50566 or 66428 nucleic acids will be denatured and allowed to renature. The secondary structure of single-stranded nucleic acids varies according to sequence, the resulting alteration in electrophoretic mobility enables the detection of even a single base change. The DNA fragments may be labeled or detected with labeled probes. The sensitivity of the assay may be enhanced by using RNA (rather than DNA), in which the secondary structure is more sensitive to a change in sequence. In a preferred embodiment, the subject method utilizes heteroduplex analysis to separate double stranded heteroduplex molecules on the basis of changes in electrophoretic mobility (Keen et al. (1991) Trends Genet 7:5).

[0598] In yet another embodiment the movement of mutant or wild-type fragments in polyacrylamide gels containing a gradient of denaturant is assayed using denaturing gradient gel electrophoresis (DGGE) (Myers et al. (1985) Nature 313:495). When DGGE is used as the method of analysis, DNA will be modified to ensure that it does not completely denature, for example by adding a GC clamp of approximately 40 bp of high-melting GC-rich DNA by PCR. In a further embodiment, a temperature gradient is used in place of a denaturing gradient to identify differences in the mobility of control and sample DNA (Rosenbaum and Reissner (1987) Biophys Chem 265:12753).

[0599] Examples of other techniques for detecting point mutations include, but are not limited to, selective oligonucleotide hybridization, selective amplification, or selective primer extension. For example, oligonucleotide primers may be prepared in which the known mutation is placed centrally and then hybridized to target DNA under conditions which permit hybridization only if a perfect match is found (Saiki et al. (1986) Nature 324:163); Saiki et al. (1989) Proc. Natl Acad. Sci USA 86:6230). Such allele specific oligonucleotides are hybridized to PCR amplified target DNA or a number of different mutations when the oligonucleotides are attached to the hybridizing membrane and hybridized with labeled target DNA.

[0600] Alternatively, allele specific amplification technology which depends on selective PCR amplification may be used in conjunction with the instant invention. Oligonucleotides used as primers for specific amplification may carry the mutation of interest in the center of the molecule (so that amplification depends on differential hybridization) (Gibbs et al. (1989) Nucleic Acids Res. 17:2437-2448) or at the extreme 3′ end of one primer where, under appropriate conditions, mismatch can prevent, or reduce polymerase extension (Prossner (1993) Tibtech 11:238). In addition it may be desirable to introduce a novel restriction site in the region of the mutation to create cleavage-based detection (Gasparini et al. (1992) Mol. Cell Probes 6:1). It is anticipated that in certain embodiments amplification may also be performed using Taq ligase for amplification (Barany (1991) Proc. Natl. Acad. Sci USA 88:189). In such cases, ligation will occur only if there is a perfect match at the 3′ end of the 5′ sequence making it possible to detect the presence of a known mutation at a specific site by looking for the presence or absence of amplification.

[0601] Furthermore, the prognostic assays described herein can be used to determine whether a subject can be administered a 140, 1470, 1686, 2089, 2427, 3702, 5891, 6428, 7181, 7660, 25641, 69583, 49863, 8897, 1682, 17667, 9235, 3703, 14171, 10359, 1660, 1450, 18894, 2088, 32427, 2160, 9252, 9389, 1642, 85269, 10297, 1584, 9525, 14124, 4469, 8990, 2100, 9288, 64698, 10480, 20893, 33230, 1586, 9943, 16334, 68862, 9011, 14031, 6178, 21225, 1420, 32236, 2099, 2150, 26583, 2784, 8941, 9811, 27444, 50566 or 66428 modulator (e.g., an agonist, antagonist, peptidomimetic, protein, peptide, nucleic acid, or small molecule) to effectively treat a disease.

[0602] Monitoring of Effects During Clinical Trials

[0603] The present invention further provides methods for determining the effectiveness of a 140, 1470, 1686, 2089, 2427, 3702, 5891, 6428, 7181, 7660, 25641, 69583, 49863, 8897, 1682, 17667, 9235, 3703, 14171, 10359, 1660, 1450, 18894, 2088, 32427, 2160, 9252, 9389, 1642, 85269, 10297, 1584, 9525, 14124, 4469, 8990, 2100, 9288, 64698, 10480, 20893, 33230, 1586, 9943, 16334, 68862, 9011, 14031, 6178, 21225, 1420, 32236, 2099, 2150, 26583, 2784, 8941, 9811, 27444, 50566 or 66428 modulator (e.g., a 140, 1470, 1686, 2089, 2427, 3702, 5891, 6428, 7181, 7660, 25641, 69583, 49863, 8897, 1682, 17667, 9235, 3703, 14171, 10359, 1660, 1450, 18894, 2088, 32427, 2160, 9252, 9389, 1642, 85269, 10297, 1584, 9525, 14124, 4469, 8990, 2100, 9288, 64698, 10480, 20893, 33230, 1586, 9943, 16334, 68862, 9011, 14031, 6178, 21225, 1420, 32236, 2099, 2150, 26583, 2784, 8941, 9811, 27444, 50566 or 66428 modulator identified herein) in treating a disease. For example, the effectiveness of a 140, 1470, 1686, 2089, 2427, 3702, 5891, 6428, 7181, 7660, 25641, 69583, 49863, 8897, 1682, 17667, 9235, 3703, 14171, 10359, 1660, 1450, 18894, 2088, 32427, 2160, 9252, 9389, 1642, 85269, 10297, 1584, 9525, 14124, 4469, 8990, 2100, 9288, 64698, 10480, 20893, 33230, 1586, 9943, 16334, 68862, 9011, 14031, 6178, 21225, 1420, 32236, 2099, 2150, 26583, 2784, 8941, 9811, 27444, 50566 or 66428 modulator in increasing 140, 1470, 1686, 2089, 2427, 3702, 5891, 6428, 7181, 7660, 25641, 69583, 49863, 8897, 1682, 17667, 9235, 3703, 14171, 10359, 1660, 1450, 18894, 2088, 32427, 2160, 9252, 9389, 1642, 85269, 10297, 1584, 9525, 14124, 4469, 8990, 2100, 9288, 64698, 10480, 20893, 33230, 1586, 9943, 16334, 68862, 9011, 14031, 6178, 21225, 1420, 32236, 2099, 2150, 26583, 2784, 8941, 9811, 27444, 50566 or 66428 gene expression, protein levels, or in upregulating 140, 1470, 1686, 2089, 2427, 3702, 5891, 6428, 7181, 7660, 25641, 69583, 49863, 8897, 1682, 17667, 9235, 3703, 14171, 10359, 1660, 1450, 18894, 2088, 32427, 2160, 9252, 9389, 1642, 85269, 10297, 1584, 9525, 14124, 4469, 8990, 2100, 9288, 64698, 10480, 20893, 33230, 1586, 9943, 16334, 68862, 9011, 14031, 6178, 21225, 1420, 32236, 2099, 2150, 26583, 2784, 8941, 9811, 27444, 50566 or 66428 activity, can be monitored in clinical trials of subjects exhibiting decreased 140, 1470, 1686, 2089, 2427, 3702, 5891, 6428, 7181, 7660, 25641, 69583, 49863, 8897, 1682, 17667, 9235, 3703, 14171, 10359, 1660, 1450, 18894, 2088, 32427, 2160, 9252, 9389, 1642, 85269, 10297, 1584, 9525, 14124, 4469, 8990, 2100, 9288, 64698, 10480, 20893, 33230, 1586, 9943, 16334, 68862, 9011, 14031, 6178, 21225, 1420, 32236, 2099, 2150, 26583, 2784, 8941, 9811, 27444, 50566 or 66428 gene expression, protein levels, or downregulated 140, 1470, 1686, 2089, 2427, 3702, 5891, 6428, 7181, 7660, 25641, 69583, 49863, 8897, 1682, 17667, 9235, 3703, 14171, 10359, 1660, 1450, 18894, 2088, 32427, 2160, 9252, 9389, 1642, 85269, 10297, 1584, 9525, 14124, 4469, 8990, 2100, 9288, 64698, 10480, 20893, 33230, 1586, 9943, 16334, 68862, 9011, 14031, 6178, 21225, 1420, 32236, 2099, 2150, 26583, 2784, 8941, 9811, 27444, 50566 or 66428 activity. Alternatively, the effectiveness of a 140, 1470, 1686, 2089, 2427, 3702, 5891, 6428, 7181, 7660, 25641, 69583, 49863, 8897, 1682, 17667, 9235, 3703, 14171, 10359, 1660, 1450, 18894, 2088, 32427, 2160, 9252, 9389, 1642, 85269, 10297, 1584, 9525, 14124, 4469, 8990, 2100, 9288, 64698, 10480, 20893, 33230, 1586, 9943, 16334, 68862, 9011, 14031, 6178, 21225, 1420, 32236, 2099, 2150, 26583, 2784, 8941, 9811, 27444, 50566 or 66428 modulator in decreasing 140, 1470, 1686, 2089, 2427, 3702, 5891, 6428, 7181, 7660, 25641, 69583, 49863, 8897, 1682, 17667, 9235, 3703, 14171, 10359, 1660, 1450, 18894, 2088, 32427, 2160, 9252, 9389, 1642, 85269, 10297, 1584, 9525, 14124, 4469, 8990, 2100, 9288, 64698, 10480, 20893, 33230, 1586, 9943, 16334, 68862, 9011, 14031, 6178, 21225, 1420, 32236, 2099, 2150, 26583, 2784, 8941, 9811, 27444, 50566 or 66428 gene expression, protein levels, or in downregulating 140, 1470, 1686, 2089, 2427, 3702, 5891, 6428, 7181, 7660, 25641, 69583, 49863, 8897, 1682, 17667, 9235, 3703, 14171, 10359, 1660, 1450, 18894, 2088, 32427, 2160, 9252, 9389, 1642, 85269, 10297, 1584, 9525, 14124, 4469, 8990, 2100, 9288, 64698, 10480, 20893, 33230, 1586, 9943, 16334, 68862, 9011, 14031, 6178, 21225, 1420, 32236, 2099, 2150, 26583, 2784, 8941, 9811, 27444, 50566 or 66428 activity, can be monitored in clinical trials of subjects exhibiting increased 140, 1470, 1686, 2089, 2427, 3702, 5891, 6428, 7181, 7660, 25641, 69583, 49863, 8897, 1682, 17667, 9235, 3703, 14171, 10359, 1660, 1450, 18894, 2088, 32427, 2160, 9252, 9389, 1642, 85269, 10297, 1584, 9525, 14124, 4469, 8990, 2100, 9288, 64698, 10480, 20893, 33230, 1586, 9943, 16334, 68862, 9011, 14031, 6178, 21225, 1420, 32236, 2099, 2150, 26583, 2784, 8941, 9811, 27444, 50566 or 66428 gene expression, protein levels, or 140, 1470, 1686, 2089, 2427, 3702, 5891, 6428, 7181, 7660, 25641, 69583, 49863, 8897, 1682, 17667, 9235, 3703, 14171, 10359, 1660, 1450, 18894, 2088, 32427, 2160, 9252, 9389, 1642, 85269, 10297, 1584, 9525, 14124, 4469, 8990, 2100, 9288, 64698, 10480, 20893, 33230, 1586, 9943, 16334, 68862, 9011, 14031, 6178, 21225, 1420, 32236, 2099, 2150, 26583, 2784, 8941, 9811, 27444, 50566 or 66428 activity. In such clinical trials, the expression or activity of a 140, 1470, 1686, 2089, 2427, 3702, 5891, 6428, 7181, 7660, 25641, 69583, 49863, 8897, 1682, 17667, 9235, 3703, 14171, 10359, 1660, 1450, 18894, 2088, 32427, 2160, 9252, 9389, 1642, 85269, 10297, 1584, 9525, 14124, 4469, 8990, 2100, 9288, 64698, 10480, 20893, 33230, 1586, 9943, 16334, 68862, 9011, 14031, 6178, 21225, 1420, 32236, 2099, 2150, 26583, 2784, 8941, 9811, 27444, 50566 or 66428 gene, and preferably, other genes that have been implicated in nociception can be used as a “read out” or marker of the phenotype of a particular cell.

[0604] For example, and not by way of limitation, genes, including 140, 1470, 1686, 2089, 2427, 3702, 5891, 6428, 7181, 7660, 25641, 69583, 49863, 8897, 1682, 17667, 9235, 3703, 14171, 10359, 1660, 1450, 18894, 2088, 32427, 2160, 9252, 9389, 1642, 85269, 10297, 1584, 9525, 14124, 4469, 8990, 2100, 9288, 64698, 10480, 20893, 33230, 1586, 9943, 16334, 68862, 9011, 14031, 6178, 21225, 1420, 32236, 2099, 2150, 26583, 2784, 8941, 9811, 27444, 50566 or 66428, that are modulated in cells by treatment with an agent which modulates 140, 1470, 1686, 2089, 2427, 3702, 5891, 6428, 7181, 7660, 25641, 69583, 49863, 8897, 1682, 17667, 9235, 3703, 14171, 10359, 1660, 1450, 18894, 2088, 32427, 2160, 9252, 9389, 1642, 85269, 10297, 1584, 9525, 14124, 4469, 8990, 2100, 9288, 64698, 10480, 20893, 33230, 1586, 9943, 16334, 68862, 9011, 14031, 6178, 21225, 1420, 32236, 2099, 2150, 26583, 2784, 8941, 9811, 27444, 50566 or 66428 activity (e.g., identified in a screening assay as described herein) can be identified. Thus, to study the effect of agents which modulate 140, 1470, 1686, 2089, 2427, 3702, 5891, 6428, 7181, 7660, 25641, 69583, 49863, 8897, 1682, 17667, 9235, 3703, 14171, 10359, 1660, 1450, 18894, 2088, 32427, 2160, 9252, 9389, 1642, 85269, 10297, 1584, 9525, 14124, 4469, 8990, 2100, 9288, 64698, 10480, 20893, 33230, 1586, 9943, 16334, 68862, 9011, 14031, 6178, 21225, 1420, 32236, 2099, 2150, 26583, 2784, 8941, 9811, 27444, 50566 or 66428 activity on subjects suffering from a cancer in, for example, a clinical trial, cells can be isolated and RNA prepared and analyzed for the levels of expression of 140, 1470, 1686, 2089, 2427, 3702, 5891, 6428, 7181, 7660, 25641, 69583, 49863, 8897, 1682, 17667, 9235, 3703, 14171, 10359, 1660, 1450, 18894, 2088, 32427, 2160, 9252, 9389, 1642, 85269, 10297, 1584, 9525, 14124, 4469, 8990, 2100, 9288, 64698, 10480, 20893, 33230, 1586, 9943, 16334, 68862, 9011, 14031, 6178, 21225, 1420, 32236, 2099, 2150, 26583, 2784, 8941, 9811, 27444, 50566 or 66428 and other genes implicated in the cancer. The levels of gene expression (e.g., a gene expression pattern) can be quantified by Northern blot analysis or RT-PCR, as described herein, or alternatively by measuring the amount of protein produced, by one of the methods described herein, or by measuring the levels of activity of 140, 1470, 1686, 2089, 2427, 3702, 5891, 6428, 7181, 7660, 25641, 69583, 49863, 8897, 1682, 17667, 9235, 3703, 14171, 10359, 1660, 1450, 18894, 2088, 32427, 2160, 9252, 9389, 1642, 85269, 10297, 1584, 9525, 14124, 4469, 8990, 2100, 9288, 64698, 10480, 20893, 33230, 1586, 9943, 16334, 68862, 9011, 14031, 6178, 21225, 1420, 32236, 2099, 2150, 26583, 2784, 8941, 9811, 27444, 50566 or 66428 or other genes. In this way, the gene expression pattern can serve as a marker, indicative of the physiological response of the cells to the agent which modulates 140, 1470, 1686, 2089, 2427, 3702, 5891, 6428, 7181, 7660, 25641, 69583, 49863, 8897, 1682, 17667, 9235, 3703, 14171, 10359, 1660, 1450, 18894, 2088, 32427, 2160, 9252, 9389, 1642, 85269, 10297, 1584, 9525, 14124, 4469, 8990, 2100, 9288, 64698, 10480, 20893, 33230, 1586, 9943, 16334, 68862, 9011, 14031, 6178, 21225, 1420, 32236, 2099, 2150, 26583, 2784, 8941, 9811, 27444, 50566 or 66428 activity. This response state may be determined before, and at various points during treatment of the individual with the agent which modulates 140, 1470, 1686, 2089, 2427, 3702, 5891, 6428, 7181, 7660, 25641, 69583, 49863, 8897, 1682, 17667, 9235, 3703, 14171, 10359, 1660, 1450, 18894, 2088, 32427, 2160, 9252, 9389, 1642, 85269, 10297, 1584, 9525, 14124, 4469, 8990, 2100, 9288, 64698, 10480, 20893, 33230, 1586, 9943, 16334, 68862, 9011, 14031, 6178, 21225, 1420, 32236, 2099, 2150, 26583, 2784, 8941, 9811, 27444, 50566 or 66428 activity.

[0605] In a preferred embodiment, the present invention provides a method for monitoring the effectiveness of treatment of a subject with an agent which modulates 140, 1470, 1686, 2089, 2427, 3702, 5891, 6428, 7181, 7660, 25641, 69583, 49863, 8897, 1682, 17667, 9235, 3703, 14171, 10359, 1660, 1450, 18894, 2088, 32427, 2160, 9252, 9389, 1642, 85269, 10297, 1584, 9525, 14124, 4469, 8990, 2100, 9288, 64698, 10480, 20893, 33230, 1586, 9943, 16334, 68862, 9011, 14031, 6178, 21225, 1420, 32236, 2099, 2150, 26583, 2784, 8941, 9811, 27444, 50566 or 66428 activity (e.g., an agonist, antagonist, peptidomimetic, protein, peptide, nucleic acid, or small molecule identified by the screening assays described herein) including the steps of (i) obtaining a pre-administration sample from a subject prior to administration of the agent; (ii) detecting the level of expression of a 140, 1470, 1686, 2089, 2427, 3702, 5891, 6428, 7181, 7660, 25641, 69583, 49863, 8897, 1682, 17667, 9235, 3703, 14171, 10359, 1660, 1450, 18894, 2088, 32427, 2160, 9252, 9389, 1642, 85269, 10297, 1584, 9525, 14124, 4469, 8990, 2100, 9288, 64698, 10480, 20893, 33230, 1586, 9943, 16334, 68862, 9011, 14031, 6178, 21225, 1420, 32236, 2099, 2150, 26583, 2784, 8941, 9811, 27444, 50566 or 66428 protein, mRNA, or genomic DNA in the pre-administration sample; (iii) obtaining one or more post-administration samples from the subject; (iv) detecting the level of expression or activity of the 140, 1470, 1686, 2089, 2427, 3702, 5891, 6428, 7181, 7660, 25641, 69583, 49863, 8897, 1682, 7667, 9235, 3703, 14171, 10359, 1660, 1450, 18894, 2088, 32427, 2160, 9252, 9389, 1642, 85269, 10297, 1584, 9525, 14124, 4469, 8990, 2100, 9288, 64698, 10480, 20893, 33230, 1586, 9943, 16334, 68862, 9011, 14031, 6178, 21225, 1420, 32236, 2099, 2150, 26583, 2784, 8941, 9811, 27444, 50566 or 66428 protein, mRNA, or genomic DNA in the post-administration samples; (v) comparing the level of expression or activity of the 140, 1470, 1686, 2089, 2427, 3702, 5891, 6428, 7181, 7660, 25641, 69583, 49863, 8897, 1682, 17667, 9235, 3703, 14171, 10359, 1660, 1450, 18894, 2088, 32427, 2160, 9252, 9389, 1642, 85269, 10297, 1584, 9525, 14124, 4469, 8990, 2100, 9288, 64698, 10480, 20893, 33230, 1586, 9943, 16334, 68862, 9011, 14031, 6178, 21225, 1420, 32236, 2099, 2150, 26583, 2784, 8941, 9811, 27444, 50566 or 66428 protein, mRNA, or genomic DNA in the pre-administration sample with the 140, 1470, 1686, 2089, 2427, 3702, 5891, 6428, 7181, 7660, 25641, 69583, 49863, 8897, 1682, 17667, 9235, 3703, 14171, 10359, 1660, 1450, 18894, 2088, 32427, 2160, 9252, 9389, 1642, 85269, 10297, 1584, 9525, 14124, 4469, 8990, 2100, 9288, 64698, 10480, 20893, 33230, 1586, 9943, 16334, 68862, 9011, 14031, 6178, 21225, 1420, 32236, 2099, 2150, 26583, 2784, 8941, 9811, 27444, 50566 or 66428 protein, mRNA, or genomic DNA in the post administration sample or samples; and (vi) altering the administration of the agent to the subject accordingly. For example, increased administration of the agent may be desirable to increase the expression or activity of 140, 1470, 1686, 2089, 2427, 3702, 5891, 6428, 7181, 7660, 25641, 69583, 49863, 8897, 1682, 17667, 9235, 3703, 14171, 10359, 1660, 1450, 18894, 2088, 32427, 2160, 9252, 9389, 1642, 85269, 10297, 1584, 9525, 14124, 4469, 8990, 2100, 9288, 64698, 10480, 20893, 33230, 1586, 9943, 16334, 68862, 9011, 14031, 6178, 21225, 1420, 32236, 2099, 2150, 26583, 2784, 8941, 9811, 27444, 50566 or 66428 to higher levels than detected, i.e., to increase the effectiveness of the agent. Alternatively, decreased administration of the agent may be desirable to decrease expression or activity of 140, 1470, 1686, 2089, 2427, 3702, 5891, 6428, 7181, 7660, 25641, 69583, 49863, 8897, 1682, 17667, 9235, 3703, 14171, 10359, 1660, 1450, 18894, 2088, 32427, 2160, 9252, 9389, 1642, 85269, 10297, 1584, 9525, 14124, 4469, 8990, 2100, 9288, 64698, 10480, 20893, 33230, 1586, 9943, 16334, 68862, 9011, 14031, 6178, 21225, 1420, 32236, 2099, 2150, 26583, 2784, 8941, 9811, 27444, 50566 or 66428 to lower levels than detected, i.e. to decrease the effectiveness of the agent. According to such an embodiment, 140, 1470, 1686, 2089, 2427, 3702, 5891, 6428, 7181, 7660, 25641, 69583, 49863, 8897, 1682, 17667, 9235, 3703, 14171, 10359, 1660, 1450, 18894, 2088, 32427, 2160, 9252, 9389, 1642, 85269, 10297, 1584, 9525, 14124, 4469, 8990, 2100, 9288, 64698, 10480, 20893, 33230, 1586, 9943, 16334, 68862, 9011, 14031, 6178, 21225, 1420, 32236, 2099, 2150, 26583, 2784, 8941, 9811, 27444, 50566 or 66428 expression or activity may be used as an indicator of the effectiveness of an agent, even in the absence of an observable phenotypic response.

[0606] Methods of Treatment:

[0607] The present invention provides for both prophylactic and therapeutic methods of treating a subject, e.g., a human, at risk of (or susceptible to) a disease. With regard to both prophylactic and therapeutic methods of treatment, such treatments may be specifically tailored or modified, based on knowledge obtained from the field of pharmacogenomics. “Pharmacogenomics,” as used herein, refers to the application of genomics technologies such as gene sequencing, statistical genetics, and gene expression analysis to drugs in clinical development and on the market. More specifically, the term refers to the study of how a patient's genes determine his or her response to a drug (e.g., a patient's “drug response phenotype”, or “drug response genotype”).

[0608] Thus, another aspect of the invention provides methods for tailoring an subject's prophylactic or therapeutic treatment with either the 140, 1470, 1686, 2089, 2427, 3702, 5891, 6428, 7181, 7660, 25641, 69583, 49863, 8897, 1682, 17667, 9235, 3703, 14171, 10359, 1660, 1450, 18894, 2088, 32427, 2160, 9252, 9389, 1642, 85269, 10297, 1584, 9525, 14124, 4469, 8990, 2100, 9288, 64698, 10480, 20893, 33230, 1586, 9943, 16334, 68862, 9011, 14031, 6178, 21225, 1420, 32236, 2099, 2150, 26583, 2784, 8941, 9811, 27444, 50566 or 66428 molecules of the present invention or 140, 1470, 1686, 2089, 2427, 3702, 5891, 6428, 7181, 7660, 25641, 69583, 49863, 8897, 1682, 17667, 9235, 3703, 14171, 10359, 1660, 1450, 18894, 2088, 32427, 2160, 9252, 9389, 1642, 85269, 10297, 1584, 9525, 14124, 4469, 8990, 2100, 9288, 64698, 10480, 20893, 33230, 1586, 9943, 16334, 68862, 9011, 14031, 6178, 21225, 1420, 32236, 2099, 2150, 26583, 2784, 8941, 9811, 27444, 50566 or 66428 modulators according to that individual's drug response genotype. Pharmacogenomics allows a clinician or physician to target prophylactic or therapeutic treatments to patients who will most benefit from the treatment and to avoid treatment of patients who will experience toxic drug-related side effects.

[0609] Prophylactic Methods

[0610] In one aspect, the invention provides a method for preventing in a subject, a disease by administering to the subject an agent which modulates 140, 1470, 1686, 2089, 2427, 3702, 5891, 6428, 7181, 7660, 25641, 69583, 49863, 8897, 1682, 17667, 9235, 3703, 14171, 10359, 1660, 1450, 18894, 2088, 32427, 2160, 9252, 9389, 1642, 85269, 10297, 1584, 9525, 14124, 4469, 8990, 2100, 9288, 64698, 10480, 20893, 33230, 1586, 9943, 16334, 68862, 9011, 14031, 6178, 21225, 1420, 32236, 2099, 2150, 26583, 2784, 8941, 9811, 27444, 50566 or 66428 expression or 140, 1470, 1686, 2089, 2427, 3702, 5891, 6428, 7181, 7660, 25641, 69583, 49863, 8897, 1682, 17667, 9235, 3703, 14171, 10359, 1660, 1450, 18894, 2088, 32427, 2160, 9252, 9389, 1642, 85269, 10297, 1584, 9525, 14124, 4469, 8990, 2100, 9288, 64698, 10480, 20893, 33230, 1586, 9943, 16334, 68862, 9011, 14031, 6178, 21225, 1420, 32236, 2099, 2150, 26583, 2784, 8941, 9811, 27444, 50566 or 66428 activity. Subjects at risk for a cancer, e.g., lung, colon, prostate, ovarian or breast cancer, can be identified by, for example, any or a combination of the diagnostic or prognostic assays described herein. Administration of a prophylactic agent can occur prior to the manifestation of symptoms characteristic of aberrant 140, 1470, 1686, 2089, 2427, 3702, 5891, 6428, 7181, 7660, 25641, 69583, 49863, 8897, 1682, 17667, 9235, 3703, 14171, 10359, 1660, 1450, 18894, 2088, 32427, 2160, 9252, 9389, 1642, 85269, 10297, 1584, 9525, 14124, 4469, 8990, 2100, 9288, 64698, 10480, 20893, 33230, 1586, 9943, 16334, 68862, 9011, 14031, 6178, 21225, 1420, 32236, 2099, 2150, 26583, 2784, 8941, 9811, 27444, 50566 or 66428 expression or activity, such that a disease is prevented or, alternatively, delayed in its progression. Depending on the type of 140, 1470, 1686, 2089, 2427, 3702, 5891, 6428, 7181, 7660, 25641, 69583, 49863, 8897, 1682, 17667, 9235, 3703, 14171, 10359, 1660, 1450, 18894, 2088, 32427, 2160, 9252, 9389, 1642, 85269, 10297, 1584, 9525, 14124, 4469, 8990, 2100, 9288, 64698, 10480, 20893, 33230, 1586, 9943, 16334, 68862, 9011, 14031, 6178, 21225, 1420, 32236, 2099, 2150, 26583, 2784, 8941, 9811, 27444, 50566 or 66428 aberrancy, for example, a 140, 1470, 1686, 2089, 2427, 3702, 5891, 6428, 7181, 7660, 25641, 69583, 49863, 8897, 1682, 17667, 9235, 3703, 14171, 10359, 1660, 1450, 18894, 2088, 32427, 2160, 9252, 9389, 1642, 85269, 10297, 1584, 9525, 14124, 4469, 8990, 2100, 9288, 64698, 10480, 20893, 33230, 1586, 9943, 16334, 68862, 9011, 14031, 6178, 21225, 1420, 32236, 2099, 2150, 26583, 2784, 8941, 9811, 27444, 50566 or 66428, 140, 1470, 1686, 2089, 2427, 3702, 5891, 6428, 7181, 7660, 25641, 69583, 49863, 8897, 1682, 17667, 9235, 3703, 14171, 10359, 1660, 1450, 18894, 2088, 32427, 2160, 9252, 9389, 1642, 85269, 10297, 1584, 9525, 14124, 4469, 8990, 2100, 9288, 64698, 10480, 20893, 33230, 1586, 9943, 16334, 68862, 9011, 14031, 6178, 21225, 1420, 32236, 2099, 2150, 26583, 2784, 8941, 9811, 27444, 50566 or 66428 agonist or 140, 1470, 1686, 2089, 2427, 3702, 5891, 6428, 7181, 7660, 25641, 69583, 49863, 8897, 1682, 17667, 9235, 3703, 14171, 10359, 1660, 1450, 18894, 2088, 32427, 2160, 9252, 9389, 1642, 85269, 10297, 1584, 9525, 14124, 4469, 8990, 2100, 9288, 64698, 10480, 20893, 33230, 1586, 9943, 16334, 68862, 9011, 14031, 6178, 21225, 1420, 32236, 2099, 2150, 26583, 2784, 8941, 9811, 27444, 50566 or 66428 antagonist agent can be used for treating the subject. The appropriate agent can be determined based on screening assays described herein.

[0611] Therapeutic Methods

[0612] Described herein are methods and compositions whereby a cancer may be ameliorated. Certain cancers are brought about, at least in part, by an excessive level of a gene product, or by the presence of a gene product exhibiting an abnormal or excessive activity. As such, the reduction in the level and/or activity of such gene products would bring about the amelioration of at least one symptom of a cancer. Techniques for the reduction of gene expression levels or the activity of a protein are discussed below.

[0613] Alternatively, certain other cancer are brought about, at least in part, by the absence or reduction of the level of gene expression, or a reduction in the level of a protein's activity. As such, an increase in the level of gene expression and/or the activity of such proteins would bring about the amelioration of at least one symptom of a cancer.

[0614] In some cases, the up-regulation of a gene in a disease state reflects a protective role for that gene product in responding to the disease condition. Enhancement of such a gene's expression, or the activity of the gene product, will reinforce the protective effect it exerts. Some urological disease states may result from an abnormally low level of activity of such a protective gene. In these cases also, an increase in the level of gene expression and/or the activity of such gene products would bring about the amelioration of a least one symptom of a cancer. Techniques for increasing target gene expression levels or target gene product activity levels are discussed herein.

[0615] Accordingly, another aspect of the invention pertains to methods of modulating 140, 1470, 1686, 2089, 2427, 3702, 5891, 6428, 7181, 7660, 25641, 69583, 49863, 8897, 1682, 17667, 9235, 3703, 14171, 10359, 1660, 1450, 18894, 2088, 32427, 2160, 9252, 9389, 1642, 85269, 10297, 1584, 9525, 14124, 4469, 8990, 2100, 9288, 64698, 10480, 20893, 33230, 1586, 9943, 16334, 68862, 9011, 14031, 6178, 21225, 1420, 32236, 2099, 2150, 26583, 2784, 8941, 9811, 27444, 50566 or 66428 expression or activity for therapeutic purposes. Accordingly, in an exemplary embodiment, the modulatory method of the invention involves contacting a cell with a 140, 1470, 1686, 2089, 2427, 3702, 5891, 6428, 7181, 7660, 25641, 69583, 49863, 8897, 1682, 17667, 9235, 3703, 14171, 10359, 1660, 1450, 18894, 2088, 32427, 2160, 9252, 9389, 1642, 85269, 10297, 1584, 9525, 14124, 4469, 8990, 2100, 9288, 64698, 10480, 20893, 33230, 1586, 9943, 16334, 68862, 9011, 14031, 6178, 21225, 1420, 32236, 2099, 2150, 26583, 2784, 8941, 9811, 27444, 50566 or 66428 or agent that modulates one or more of the activities of 140, 1470, 1686, 2089, 2427, 3702, 5891, 6428, 7181, 7660, 25641, 69583, 49863, 8897, 1682, 17667, 9235, 3703, 14171, 10359, 1660, 1450, 18894, 2088, 32427, 2160, 9252, 9389, 1642, 85269, 10297, 1584, 9525, 14124, 4469, 8990, 2100, 9288, 64698, 10480, 20893, 33230, 1586, 9943, 16334, 68862, 9011, 14031, 6178, 21225, 1420, 32236, 2099, 2150, 26583, 2784, 8941, 9811, 27444, 50566 or 66428 protein activity associated with the cell (e.g., an endothelial cell, ovarian cell, bladder cell and prostate cell). An agent that modulates 140, 1470, 1686, 2089, 2427, 3702, 5891, 6428, 7181, 7660, 25641, 69583, 49863, 8897, 1682, 17667, 9235, 3703, 14171, 10359, 1660, 1450, 18894, 2088, 32427, 2160, 9252, 9389, 1642, 85269, 10297, 1584, 9525, 14124, 4469, 8990, 2100, 9288, 64698, 10480, 20893, 33230, 1586, 9943, 16334, 68862, 9011, 14031, 6178, 21225, 1420, 32236, 2099, 2150, 26583, 2784, 8941, 9811, 27444, 50566 or 66428 protein activity can be an agent as described herein, such as a nucleic acid or a protein, a naturally-occurring target molecule of a 140, 1470, 1686, 2089, 2427, 3702, 5891, 6428, 7181, 7660, 25641, 69583, 49863, 8897, 1682, 17667, 9235, 3703, 14171, 10359, 1660, 1450, 18894, 2088, 32427, 2160, 9252, 9389, 1642, 85269, 10297, 1584, 9525, 14124, 4469, 8990, 2100, 9288, 64698, 10480, 20893, 33230, 1586, 9943, 16334, 68862, 9011, 14031, 6178, 21225, 1420, 32236, 2099, 2150, 26583, 2784, 8941, 9811, 27444, 50566 or 66428 protein (e.g., a 140, 1470, 1686, 2089, 2427, 3702, 5891, 6428, 7181, 7660, 25641, 69583, 49863, 8897, 1682, 17667, 9235, 3703, 14171, 10359, 1660, 1450, 18894, 2088, 32427, 2160, 9252, 9389, 1642, 85269, 10297, 1584, 9525, 14124, 4469, 8990, 2100, 9288, 64698, 10480, 20893, 33230, 1586, 9943, 16334, 68862, 9011, 14031, 6178, 21225, 1420, 32236, 2099, 2150, 26583, 2784, 8941, 9811, 27444, 50566 or 66428 ligand or substrate), a 140, 1470, 1686, 2089, 2427, 3702, 5891, 6428, 7181, 7660, 25641, 69583, 49863, 8897, 1682, 17667, 9235, 3703, 14171, 10359, 1660, 1450, 18894, 2088, 32427, 2160, 9252, 9389, 1642, 85269, 10297, 1584, 9525, 14124, 4469, 8990, 2100, 9288, 64698, 10480, 20893, 33230, 1586, 9943, 16334, 68862, 9011, 14031, 6178, 21225, 1420, 32236, 2099, 2150, 26583, 2784, 8941, 9811, 27444, 50566 or 66428 antibody, a 140, 1470, 1686, 2089, 2427, 3702, 5891, 6428, 7181, 7660, 25641, 69583, 49863, 8897, 1682, 17667, 9235, 3703, 14171, 10359, 1660, 1450, 18894, 2088, 32427, 2160, 9252, 9389, 1642, 85269, 10297, 1584, 9525, 14124, 4469, 8990, 2100, 9288, 64698, 10480, 20893, 33230, 1586, 9943, 16334, 68862, 9011, 14031, 6178, 21225, 1420, 32236, 2099, 2150, 26583, 2784, 8941, 9811, 27444, 50566 or 66428 agonist or antagonist, a peptidomimetic of a 140, 1470, 1686, 2089, 2427, 3702, 5891, 6428, 7181, 7660, 25641, 69583, 49863, 8897, 1682, 17667, 9235, 3703, 14171, 10359, 1660, 1450, 18894, 2088, 32427, 2160, 9252, 9389, 1642, 85269, 10297, 1584, 9525, 14124, 4469, 8990, 2100, 9288, 64698, 10480, 20893, 33230, 1586, 9943, 16334, 68862, 9011, 14031, 6178, 21225, 1420, 32236, 2099, 2150, 26583, 2784, 8941, 9811, 27444, 50566 or 66428 agonist or antagonist, or other small molecule. In one embodiment, the agent stimulates one or more 140, 1470, 1686, 2089, 2427, 3702, 5891, 6428, 7181, 7660, 25641, 69583, 49863, 8897, 1682, 17667, 9235, 3703, 14171, 10359, 1660, 1450, 18894, 2088, 32427, 2160, 9252, 9389, 1642, 85269, 10297, 1584, 9525, 14124, 4469, 8990, 2100, 9288, 64698, 10480, 20893, 33230, 1586, 9943, 16334, 68862, 9011, 14031, 6178, 21225, 1420, 32236, 2099, 2150, 26583, 2784, 8941, 9811, 27444, 50566 or 66428 activities. Examples of such stimulatory agents include active 140, 1470, 1686, 2089, 2427, 3702, 5891, 6428, 7181, 7660, 25641, 69583, 49863, 8897, 1682, 17667, 9235, 3703, 14171, 10359, 1660, 1450, 18894, 2088, 32427, 2160, 9252, 9389, 1642, 85269, 10297, 1584, 9525, 14124, 4469, 8990, 2100, 9288, 64698, 10480, 20893, 33230, 1586, 9943, 16334, 68862, 9011, 14031, 6178, 21225, 1420, 32236, 2099, 2150, 26583, 2784, 8941, 9811, 27444, 50566 or 66428 protein and a nucleic acid molecule encoding 140, 1470, 1686, 2089, 2427, 3702, 5891, 6428, 7181, 7660, 25641, 69583, 49863, 8897, 1682, 17667, 9235, 3703, 14171, 10359, 1660, 1450, 18894, 2088, 32427, 2160, 9252, 9389, 1642, 85269, 10297, 1584, 9525, 14124, 4469, 8990, 2100, 9288, 64698, 10480, 20893, 33230, 1586, 9943, 16334, 68862, 9011, 14031, 6178, 21225, 1420, 32236, 2099, 2150, 26583,-2784, 8941, 9811, 27444, 50566 or 66428 that has been introduced into the cell. In another embodiment, the agent inhibits one or more 140, 1470, 1686, 2089, 2427, 3702, 5891, 6428, 7181, 7660, 25641, 69583, 49863, 8897, 1682, 17667, 9235, 3703, 14171, 10359, 1660, 1450, 18894, 2088, 32427, 2160, 9252, 9389, 1642, 85269, 10297, 1584, 9525, 14124, 4469, 8990, 2100, 9288, 64698, 10480, 20893, 33230, 1586, 9943, 16334, 68862, 9011, 14031, 6178, 21225, 1420, 32236, 2099, 2150, 26583, 2784, 8941, 9811, 27444, 50566 or 66428 activities. Examples of such inhibitory agents include antisense 140, 1470, 1686, 2089, 2427, 3702, 5891, 6428, 7181, 7660, 25641, 69583, 49863, 8897, 1682, 17667, 9235, 3703, 14171, 10359, 1660, 1450, 18894, 2088, 32427, 2160, 9252, 9389, 1642, 85269, 10297, 1584, 9525, 14124, 4469, 8990, 2100, 9288, 64698, 10480, 20893, 33230, 1586, 9943, 16334, 68862, 9011, 14031, 6178, 21225, 1420, 32236, 2099, 2150, 26583, 2784, 8941, 9811, 27444, 50566 or 66428 nucleic acid molecules, anti-140, 1470, 1686, 2089, 2427, 3702, 5891, 6428, 7181, 7660, 25641, 69583, 49863, 8897, 1682, 17667, 9235, 3703, 14171, 10359, 1660, 1450, 18894, 2088, 32427, 2160, 9252, 9389, 1642, 85269, 10297, 1584, 9525, 14124, 4469, 8990, 2100, 9288, 64698, 10480, 20893, 33230, 1586, 9943, 16334, 68862, 9011, 14031, 6178, 21225, 1420, 32236, 2099, 2150, 26583, 2784, 8941, 9811, 27444, 50566 or 66428 antibodies, and 140, 1470, 1686, 2089, 2427, 3702, 5891, 6428, 7181, 7660, 25641, 69583, 49863, 8897, 1682, 17667, 9235, 3703, 14171, 10359, 1660, 1450, 18894, 2088, 32427, 2160, 9252, 9389, 1642, 85269, 10297, 1584, 9525, 14124, 4469, 8990, 2100, 9288, 64698, 10480, 20893, 33230, 1586, 9943, 16334, 68862, 9011, 14031, 6178, 21225, 1420, 32236, 2099, 2150, 26583, 2784, 8941, 9811, 27444, 50566 or 66428 inhibitors. These modulatory methods can be performed in vitro (e.g., by culturing the cell with the agent) or, alternatively, in vivo (e.g., by administering the agent to a subject). As such, the present invention provides methods of treating an individual afflicted with a disease or disorder characterized by aberrant or unwanted expression or activity of a 140, 1470, 1686, 2089, 2427, 3702, 5891, 6428, 7181, 7660, 25641, 69583, 49863, 8897, 1682, 17667, 9235, 3703, 14171, 10359, 1660, 1450, 18894, 2088, 32427, 2160, 9252, 9389, 1642, 85269, 10297, 1584, 9525, 14124, 4469, 8990, 2100, 9288, 64698, 10480, 20893, 33230, 1586, 9943, 16334, 68862, 9011, 14031, 6178, 21225, 1420, 32236, 2099, 2150, 26583, 2784, 8941, 9811, 27444, 50566 or 66428 protein or nucleic acid molecule. In one embodiment, the method involves administering an agent (e.g., an agent identified by a screening assay described herein), or combination of agents that modulates (e.g., upregulates or downregulates) 140, 1470, 1686, 2089, 2427, 3702, 5891, 6428, 7181, 7660, 25641, 69583, 49863, 8897, 1682, 17667, 9235, 3703, 14171, 10359, 1660, 1450, 18894, 2088, 32427, 2160, 9252, 9389, 1642, 85269, 10297, 1584, 9525, 14124, 4469, 8990, 2100, 9288, 64698, 10480, 20893, 33230, 1586, 9943, 16334, 68862, 9011, 14031, 6178, 21225, 1420, 32236, 2099, 2150, 26583, 2784, 8941, 9811, 27444, 50566 or 66428 expression or activity. In another embodiment, the method involves administering a 140, 1470, 1686, 2089, 2427, 3702, 5891, 6428, 7181, 7660, 25641, 69583, 49863, 8897, 1682, 17667, 9235, 3703, 14171, 10359, 1660, 1450, 18894, 2088, 32427, 2160, 9252, 9389, 1642, 85269, 10297, 1584, 9525, 14124, 4469, 8990, 2100, 9288, 64698, 10480, 20893, 33230, 1586, 9943, 16334, 68862, 9011, 14031, 6178, 21225, 1420, 32236, 2099, 2150, 26583, 2784, 8941, 9811, 27444, 50566 or 66428 protein or nucleic acid molecule as therapy to compensate for reduced, aberrant, or unwanted 140, 1470, 1686, 2089, 2427, 3702, 5891, 6428, 7181, 7660, 25641, 69583, 49863, 8897, 1682, 17667, 9235, 3703, 14171, 10359, 1660, 1450, 18894, 2088, 32427, 2160, 9252, 9389, 1642, 85269, 10297, 1584, 9525, 14124, 4469, 8990, 2100, 9288, 64698, 10480, 20893, 33230, 1586, 9943, 16334, 68862, 9011, 14031, 6178, 21225, 1420, 32236, 2099, 2150, 26583, 2784, 8941, 9811, 27444, 50566 or 66428 expression or activity.

[0616] Stimulation of 140, 1470, 1686, 2089, 2427, 3702, 5891, 6428, 7181, 7660, 25641, 69583, 49863, 8897, 1682, 17667, 9235, 3703, 14171, 10359, 1660, 1450, 18894, 2088, 32427, 2160, 9252, 9389, 1642, 85269, 10297, 1584, 9525, 14124, 4469, 8990, 2100, 9288, 64698, 10480, 20893, 33230, 1586, 9943, 16334, 68862, 9011, 14031, 6178, 21225, 1420, 32236, 2099, 2150, 26583, 2784, 8941, 9811, 27444, 50566 or 66428 activity is desirable in situations in which 140, 1470, 1686, 2089, 2427, 3702, 5891, 6428, 7181, 7660, 25641, 69583, 49863, 8897, 1682, 17667, 9235, 3703, 14171, 10359, 1660, 1450, 18894, 2088, 32427, 2160, 9252, 9389, 1642, 85269, 10297, 1584, 9525, 14124, 4469, 8990, 2100, 9288, 64698, 10480, 20893, 33230, 1586, 9943, 16334, 68862, 9011, 14031, 6178, 21225, 1420, 32236, 2099, 2150, 26583, 2784, 8941, 9811, 27444, 50566 or 66428 is abnormally downregulated and/or in which increased 140, 1470, 1686, 2089, 2427, 3702, 5891, 6428, 7181, 7660, 25641, 69583, 49863, 8897, 1682, 17667, 9235, 3703, 14171, 10359, 1660, 1450, 18894, 2088, 32427, 2160, 9252, 9389, 1642, 85269, 10297, 1584, 9525, 14124, 4469, 8990, 2100, 9288, 64698, 10480, 20893, 33230, 1586, 9943, 16334, 68862, 9011, 14031, 6178, 21225, 1420, 32236, 2099, 2150, 26583, 2784, 8941, 9811, 27444, 50566 or 66428 activity is likely to have a beneficial effect. Likewise, inhibition of 140, 1470, 1686, 2089, 2427, 3702, 5891, 6428, 7181, 7660, 25641, 69583, 49863, 8897, 1682, 17667, 9235, 3703, 14171, 10359, 1660, 1450, 18894, 2088, 32427, 2160, 9252, 9389, 1642, 85269, 10297, 1584, 9525, 14124, 4469, 8990, 2100, 9288, 64698, 10480, 20893, 33230, 1586, 9943, 16334, 68862, 9011, 14031, 6178, 21225, 1420, 32236, 2099, 2150, 26583, 2784, 8941, 9811, 27444, 50566 or 66428 activity is desirable in situations in which 140, 1470, 1686, 2089, 2427, 3702, 5891, 6428, 7181, 7660, 25641, 69583, 49863, 8897, 1682, 17667, 9235, 3703, 14171, 10359, 1660, 1450, 18894, 2088, 32427, 2160, 9252, 9389, 1642, 85269, 10297, 1584, 9525, 14124, 4469, 8990, 2100, 9288, 64698, 10480, 20893, 33230, 1586, 9943, 16334, 68862, 9011, 14031, 6178, 21225, 1420, 32236, 2099, 2150, 26583, 2784, 8941, 9811, 27444, 50566 or 66428 is abnormally upregulated and/or in which decreased 140, 1470, 1686, 2089, 2427, 3702, 5891, 6428, 7181, 7660, 25641, 69583, 49863, 8897, 1682, 17667, 9235, 3703, 14171, 10359, 1660, 1450, 18894, 2088, 32427, 2160, 9252, 9389, 1642, 85269, 10297, 1584, 9525, 14124, 4469, 8990, 2100, 9288, 64698, 10480, 20893, 33230, 1586, 9943, 16334, 68862, 9011, 14031, 6178, 21225, 1420, 32236, 2099, 2150, 26583, 2784, 8941, 9811, 27444, 50566 or 66428 activity is likely to have a beneficial effect.

[0617] Methods for Inhibiting Target Gene Expression, Synthesis, or Activity

[0618] As discussed above, genes involved in cancer may cause such disorders via an increased level of gene activity. In some cases, such up-regulation may have a causative or exacerbating effect on the disease state. A variety of techniques may be used to inhibit the expression, synthesis, or activity of such genes and/or proteins.

[0619] For example, compounds such as those identified through assays described above, which exhibit inhibitory activity, may be used in accordance with the invention to ameliorate at least one symptom of a cancer. Such molecules may include, but are not limited to, small organic molecules, peptides, antibodies, and the like.

[0620] For example, compounds can be administered that compete with endogenous ligand for the 140, 1470, 1686, 2089, 2427, 3702, 5891, 6428, 7181, 7660, 25641, 69583, 49863, 8897, 1682, 17667, 9235, 3703, 14171, 10359, 1660, 1450, 18894, 2088, 32427, 2160, 9252, 9389, 1642, 85269, 10297, 1584, 9525, 14124, 4469, 8990, 2100, 9288, 64698, 10480, 20893, 33230, 1586, 9943, 16334, 68862, 9011, 14031, 6178, 21225, 1420, 32236, 2099, 2150, 26583, 2784, 8941, 9811, 27444, 50566 or 66428 protein. The resulting reduction in the amount of ligand-bound 140, 1470, 1686, 2089, 2427, 3702, 5891, 6428, 7181, 7660, 25641, 69583, 49863, 8897, 1682, 17667, 9235, 3703, 14171, 10359, 1660, 1450, 18894, 2088, 32427, 2160, 9252, 9389, 1642, 85269, 10297, 1584, 9525, 14124, 4469, 8990, 2100, 9288, 64698, 10480, 20893, 33230, 1586, 9943, 16334, 68862, 9011, 14031, 6178, 21225, 1420, 32236, 2099, 2150, 26583, 2784, 8941, 9811, 27444, 50566 or 66428 protein will modulate endothelial cell physiology. Compounds that can be particularly useful for this purpose include, for example, soluble proteins or peptides, such as peptides comprising one or more of the extracellular domains, or portions and/or analogs thereof, of the 140, 1470, 1686, 2089, 2427, 3702, 5891, 6428, 7181, 7660, 25641, 69583, 49863, 8897, 1682, 17667, 9235, 3703, 14171, 10359, 1660, 1450, 18894, 2088, 32427, 2160, 9252, 9389, 1642, 85269, 10297, 1584, 9525, 14124, 4469, 8990, 2100, 9288, 64698, 10480, 20893, 33230, 1586, 9943, 16334, 68862, 9011, 14031, 6178, 21225, 1420, 32236, 2099, 2150, 26583, 2784, 8941, 9811, 27444, 50566 or 66428 protein, including, for example, soluble fusion proteins such as Ig-tailed fusion proteins. (For a discussion of the production of Ig-tailed fusion proteins, see, for example, U.S. Pat. No. 5,116,964). Alternatively, compounds, such as ligand analogs or antibodies, that bind to the 140, 1470, 1686, 2089, 2427, 3702, 5891, 6428, 7181, 7660, 25641, 69583, 49863, 8897, 1682, 17667, 9235, 3703, 14171, 10359, 1660, 1450, 18894, 2088, 32427, 2160, 9252, 9389, 1642, 85269, 10297, 1584, 9525, 14124, 4469, 8990, 2100, 9288, 64698, 10480, 20893, 33230, 1586, 9943, 16334, 68862, 9011, 14031, 6178, 21225, 1420, 32236, 2099, 2150, 26583, 2784, 8941, 9811, 27444, 50566 or 66428 receptor site, but do not activate the protein, (e.g., receptor-ligand antagonists) can be effective in inhibiting 140, 1470, 1686, 2089, 2427, 3702, 5891, 6428, 7181, 7660, 25641, 69583, 49863, 8897, 1682, 17667, 9235, 3703, 14171, 10359, 1660, 1450, 18894, 2088, 32427, 2160, 9252, 9389, 1642, 85269, 10297, 1584, 9525, 14124, 4469, 8990, 2100, 9288, 64698, 10480, 20893, 33230, 1586, 9943, 16334, 68862, 9011, 14031, 6178, 21225, 1420, 32236, 2099, 2150, 26583, 2784, 8941, 9811, 27444, 50566 or 66428 protein activity.

[0621] Further, antisense and ribozyme molecules which inhibit expression of the 140, 1470, 1686, 2089, 2427, 3702, 5891, 6428, 7181, 7660, 25641, 69583, 49863, 8897, 1682, 17667, 9235, 3703, 14171, 10359, 1660, 1450, 18894, 2088, 32427, 2160, 9252, 9389, 1642, 85269, 10297, 1584, 9525, 14124, 4469, 8990, 2100, 9288, 64698, 10480, 20893, 33230, 1586, 9943, 16334, 68862, 9011, 14031, 6178, 21225, 1420, 32236, 2099, 2150, 26583, 2784, 8941, 9811, 27444, 50566 or 66428 gene may also be used in accordance with the invention to inhibit aberrant 140, 1470, 1686, 2089, 2427, 3702, 5891, 6428, 7181, 7660, 25641, 69583, 49863, 8897, 1682, 17667, 9235, 3703, 14171, 10359, 1660, 1450, 18894, 2088, 32427, 2160, 9252, 9389, 1642, 85269, 10297, 1584, 9525, 14124, 4469, 8990, 2100, 9288, 64698, 10480, 20893, 33230, 1586, 9943, 16334, 68862, 9011, 14031, 6178, 21225, 1420, 32236, 2099, 2150, 26583, 2784, 8941, 9811, 27444, 50566 or 66428 gene activity. Still further, triple helix molecules may be utilized in inhibiting aberrant 140, 1470, 1686, 2089, 2427, 3702, 5891, 6428, 7181, 7660, 25641, 69583, 49863, 8897, 1682, 17667, 9235, 3703, 14171, 10359, 1660, 1450, 18894, 2088, 32427, 2160, 9252, 9389, 1642, 85269, 10297, 1584, 9525, 14124, 4469, 8990, 2100, 9288, 64698, 10480, 20893, 33230, 1586, 9943, 16334, 68862, 9011, 14031, 6178, 21225, 1420, 32236, 2099, 2150, 26583, 2784, 8941, 9811, 27444, 50566 or 66428 gene activity.

[0622] The antisense nucleic acid molecules used in the methods of the invention are typically administered to a subject or generated in situ such that they hybridize with or bind to cellular mRNA and/or genomic DNA encoding a 140, 1470, 1686, 2089, 2427, 3702, 5891, 6428, 7181, 7660, 25641, 69583, 49863, 8897, 1682, 17667, 9235, 3703, 14171, 10359, 1660, 1450, 18894, 2088, 32427, 2160, 9252, 9389, 1642, 85269, 10297, 1584, 9525, 14124, 4469, 8990, 2100, 9288, 64698, 10480, 20893, 33230, 1586, 9943, 16334, 68862, 9011, 14031, 6178, 21225, 1420, 32236, 2099, 2150, 26583, 2784, 8941, 9811, 27444, 50566 or 66428 protein to thereby inhibit expression of the protein, e.g., by inhibiting transcription and/or translation. The hybridization can be by conventional nucleotide complementarity to form a stable duplex, or, for example, in the case of an antisense nucleic acid molecule which binds to DNA duplexes, through specific interactions in the major groove of the double helix. An example of a route of administration of antisense nucleic acid molecules of the invention include direct injection at a tissue site. Alternatively, antisense nucleic acid molecules can be modified to target selected cells and then administered systemically. For example, for systemic administration, antisense molecules can be modified such that they specifically bind to receptors or antigens expressed on a selected cell surface, e.g., by linking the antisense nucleic acid molecules to peptides or antibodies which bind to cell surface receptors or antigens. The antisense nucleic acid molecules can also be delivered to cells using the vectors described herein. To achieve sufficient intracellular concentrations of the antisense molecules, vector constructs in which the antisense nucleic acid molecule is placed under the control of a strong pol II or pol III promoter are preferred.

[0623] In yet another embodiment, an antisense nucleic acid molecule used in the methods of the invention is an α-anomeric nucleic acid molecule. An α-anomeric nucleic acid molecule forms specific double-stranded hybrids with complementary RNA in which, contrary to the usual β-units, the strands run parallel to each other (Gaultier et al. (1987) Nucleic Acids. Res. 15:6625-6641). The antisense nucleic acid molecule can also comprise a 2′-o-methylribonucleotide (Inoue et al. (1987) Nucleic Acids Res. 15:6131-6148) or a chimeric RNA-DNA analogue (Inoue et al. (1987) FEBS Lett. 215:327-330).

[0624] In still another embodiment, an antisense nucleic acid used in the methods of the invention is a ribozyme. Ribozymes are catalytic RNA molecules with ribonuclease activity which are capable of cleaving a single-stranded nucleic acid, such as an mRNA, to which they have a complementary region. Thus, ribozymes (e.g., hammerhead ribozymes (described in Haselhoff and Gerlach (1988) Nature 334:585-591)) can be used to catalytically cleave 140, 1470, 1686, 2089, 2427, 3702, 5891, 6428, 7181, 7660, 25641, 69583, 49863, 8897, 1682, 17667, 9235, 3703, 14171, 10359, 1660, 1450, 18894, 2088, 32427, 2160, 9252, 9389, 1642, 85269, 10297, 1584, 9525, 14124, 4469, 8990, 2100, 9288, 64698, 10480, 20893, 33230, 1586, 9943, 16334, 68862, 9011, 14031, 6178, 21225, 1420, 32236, 2099, 2150, 26583, 2784, 8941, 9811, 27444, 50566 or 66428 mRNA transcripts to thereby inhibit translation of 140, 1470, 1686, 2089, 2427, 3702, 5891, 6428, 7181, 7660, 25641, 69583, 49863, 8897, 1682, 17667, 9235, 3703, 14171, 10359, 1660, 1450, 18894, 2088, 32427, 2160, 9252, 9389, 1642, 85269, 10297, 1584, 9525, 14124, 4469, 8990, 2100, 9288, 64698, 10480, 20893, 33230, 1586, 9943, 16334, 68862, 9011, 14031, 6178, 21225, 1420, 32236, 2099, 2150, 26583, 2784, 8941, 9811, 27444, 50566 or 66428 mRNA. A ribozyme having specificity for a 32457-encoding nucleic acid can be designed based upon the nucleotide sequence of a 140, 1470, 1686, 2089, 2427, 3702, 5891, 6428, 7181, 7660, 25641, 69583, 49863, 8897, 1682, 17667, 9235, 3703, 14171, 10359, 1660, 1450, 18894, 2088, 32427, 2160, 9252, 9389, 1642, 85269, 10297, 1584, 9525, 14124, 4469, 8990, 2100, 9288, 64698, 10480, 20893, 33230, 1586, 9943, 16334, 68862, 9011, 14031, 6178, 21225, 1420, 32236, 2099, 2150, 26583, 2784, 8941, 9811, 27444, 50566 or 66428 cDNA disclosed herein (i.e., SEQ ID NO:1, 3, 5, 7, 9, 11, 13, 15, 17, 19, 21, 23, 25, 27, 29, 31, 33, 35, 37, 39, 41, 43, 45, 47, 49, 51, 53, 55, 57, 59, 61, 63, 65, 67, 69, 71, 73, 75, 77, 79, 81, 83, 85, 87, 89, 91, 93, 95, 97, 99, 101, 103, 105, 107, 109, 111, 113, 115, 117, 119 or 121). For example, a derivative of a Tetrahymena L-19 IVS RNA can be constructed in which the nucleotide sequence of the active site is complementary to the nucleotide sequence to be cleaved in a, 2784, 8941, 9811, 27444, 50566 or 66428-encoding mRNA (see, for example, Cech et al. U.S. Pat. No. 4,987,071; and Cech et al. U.S. Pat. No. 5,116,742). Alternatively, 140, 1470, 1686, 2089, 2427, 3702, 5891, 6428, 7181, 7660, 25641, 69583, 49863, 8897, 1682, 17667, 9235, 3703, 14171, 10359, 1660, 1450, 18894, 2088, 32427, 2160, 9252, 9389, 1642, 85269, 10297, 1584, 9525, 14124, 4469, 8990, 2100, 9288, 64698, 10480, 20893, 33230, 1586, 9943, 16334, 68862, 9011, 14031, 6178, 21225, 1420, 32236, 2099, 2150, 26583, 2784, 8941, 9811, 27444, 50566 or 66428 mRNA can be used to select a catalytic RNA having a specific ribonuclease activity from a pool of RNA molecules (see, for example, Bartel, D. and Szostak, J. W. (1993) Science 261:1411-1418).

[0625] 140, 1470, 1686, 2089, 2427, 3702, 5891, 6428, 7181, 7660, 25641, 69583, 49863, 8897, 1682, 17667, 9235, 3703, 14171, 10359, 1660, 1450, 18894, 2088, 32427, 2160, 9252, 9389, 1642, 85269, 10297, 1584, 9525, 14124, 4469, 8990, 2100, 9288, 64698, 10480, 20893, 33230, 1586, 9943, 16334, 68862, 9011, 14031, 6178, 21225, 1420, 32236, 2099, 2150, 26583, 2784, 8941, 9811, 27444, 50566 or 66428 gene expression can also be inhibited by targeting nucleotide sequences complementary to the regulatory region of the 140, 1470, 1686, 2089, 2427, 3702, 5891, 6428, 7181, 7660, 25641, 69583, 49863, 8897, 1682, 17667, 9235, 3703, 14171, 10359, 1660, 1450, 18894, 2088, 32427, 2160, 9252, 9389, 1642, 85269, 10297, 1584, 9525, 14124, 4469, 8990, 2100, 9288, 64698, 10480, 20893, 33230, 1586, 9943, 16334, 68862, 9011, 14031, 6178, 21225, 1420, 32236, 2099, 2150, 26583, 2784, 8941, 9811, 27444, 50566 or 66428 (e.g., the 140, 1470, 1686, 2089, 2427, 3702, 5891, 6428, 7181, 7660, 25641, 69583, 49863, 8897, 1682, 17667, 9235, 3703, 14171, 10359, 1660, 1450, 18894, 2088, 32427, 2160, 9252, 9389, 1642, 85269, 10297, 1584, 9525, 14124, 4469, 8990, 2100, 9288, 64698, 10480, 20893, 33230, 1586, 9943, 16334, 68862, 9011, 14031, 6178, 21225, 1420, 32236, 2099, 2150, 26583, 2784, 8941, 9811, 27444, 50566 or 66428 promoter and/or enhancers) to form triple helical structures that prevent transcription of the 140, 1470, 1686, 2089, 2427, 3702, 5891, 6428, 7181, 7660, 25641, 69583, 49863, 8897, 1682, 17667, 9235, 3703, 14171, 10359, 1660, 1450, 18894, 2088, 32427, 2160, 9252, 9389, 1642, 85269, 10297, 1584, 9525, 14124, 4469, 8990, 2100, 9288, 64698, 10480, 20893, 33230, 1586, 9943, 16334, 68862, 9011, 14031, 6178, 21225, 1420, 32236, 2099, 2150, 26583, 2784, 8941, 9811, 27444, 50566 or 66428 gene in target cells (see, for example, Helene, C. (1991) Anticancer Drug Des. 6(6):569-84; Helene, C. et al. (1992) Ann. N.Y. Acad. Sci. 660:27-36; and Maher, L. J. (1992) Bioassays 14(12):807-15).

[0626] Antibodies that are both specific for the 140, 1470, 1686, 2089, 2427, 3702, 5891, 6428, 7181, 7660, 25641, 69583, 49863, 8897, 1682, 17667, 9235, 3703, 14171, 10359, 1660, 1450, 18894, 2088, 32427, 2160, 9252, 9389, 1642, 85269, 10297, 1584, 9525, 14124, 4469, 8990, 2100, 9288, 64698, 10480, 20893, 33230, 1586, 9943, 16334, 68862, 9011, 14031, 6178, 21225, 1420, 32236, 2099, 2150, 26583, 2784, 8941, 9811, 27444, 50566 or 66428 protein and interfere with its activity may also be used to modulate or inhibit 140, 1470, 1686, 2089, 2427, 3702, 5891, 6428, 7181, 7660, 25641, 69583, 49863, 8897, 1682, 17667, 9235, 3703, 14171, 10359, 1660, 1450, 18894, 2088, 32427, 2160, 9252, 9389, 1642, 85269, 10297, 1584, 9525, 14124, 4469, 8990, 2100, 9288, 64698, 10480, 20893, 33230, 1586, 9943, 16334, 68862, 9011, 14031, 6178, 21225, 1420, 32236, 2099, 2150, 26583, 2784, 8941, 9811, 27444, 50566 or 66428 protein function. Such antibodies may be generated using standard techniques described herein, against the 140, 1470, 1686, 2089, 2427, 3702, 5891, 6428, 7181, 7660, 25641, 69583, 49863, 8897, 1682, 17667, 9235, 3703, 14171, 10359, 1660, 1450, 18894, 2088, 32427, 2160, 9252, 9389, 1642, 85269, 10297, 1584, 9525, 14124, 4469, 8990, 2100, 9288, 64698, 10480, 20893, 33230, 1586, 9943, 16334, 68862, 9011, 14031, 6178, 21225, 1420, 32236, 2099, 2150, 26583, 2784, 8941, 9811, 27444, 50566 or 66428 protein itself or against peptides corresponding to portions of the protein. Such antibodies include but are not limited to polyclonal, monoclonal, Fab fragments, single chain antibodies, or chimeric antibodies.

[0627] In instances where the target gene protein is intracellular and whole antibodies are used, internalizing antibodies may be preferred. Lipofectin liposomes may be used to deliver the antibody or a fragment of the Fab region which binds to the target epitope into cells. Where fragments of the antibody are used, the smallest inhibitory fragment which binds to the target protein's binding domain is preferred. For example, peptides having an amino acid sequence corresponding to the domain of the variable region of the antibody that binds to the target gene protein may be used. Such peptides may be synthesized chemically or produced via recombinant DNA technology using methods well known in the art (described in, for example, Creighton (1983), supra; and Sambrook et al. (1989) supra). Single chain neutralizing antibodies which bind to intracellular target gene epitopes may also be administered. Such single chain antibodies may be administered, for example, by expressing nucleotide sequences encoding single-chain antibodies within the target cell population by utilizing, for example, techniques such as those described in Marasco et al. (1993) Proc. Natl. Acad. Sci. USA 90:7889-7893).

[0628] In some instances, the target gene protein is extracellular, or is a transmembrane protein, such as the 140, 1470, 1686, 2089, 2427, 3702, 5891, 6428, 7181, 7660, 25641, 69583, 49863, 8897, 1682, 17667, 9235, 3703, 14171, 10359, 1660, 1450, 18894, 2088, 32427, 2160, 9252, 9389, 1642, 85269, 10297, 1584, 9525, 14124, 4469, 8990, 2100, 9288, 64698, 10480, 20893, 33230, 1586, 9943, 16334, 68862, 9011, 14031, 6178, 21225, 1420, 32236, 2099, 2150, 26583, 2784, 8941, 9811, 27444, 50566 or 66428 protein. Antibodies that are specific for one or more extracellular domains of the 140, 1470, 1686, 2089, 2427, 3702, 5891, 6428, 7181, 7660, 25641, 69583, 49863, 8897, 1682, 17667, 9235, 3703, 14171, 10359, 1660, 1450, 18894, 2088, 32427, 2160, 9252, 9389, 1642, 85269, 10297, 1584, 9525, 14124, 4469, 8990, 2100, 9288, 64698, 10480, 20893, 33230, 1586, 9943, 16334, 68862, 9011, 14031, 6178, 21225, 1420, 32236, 2099, 2150, 26583, 2784, 8941, 9811, 27444, 50566 or 66428 protein, for example, and that interfere with its activity, are particularly useful in treating cancer or a cancer. Such antibodies are especially efficient because they can access the target domains directly from the bloodstream. Any of the administration techniques described below which are appropriate for peptide administration may be utilized to effectively administer inhibitory target gene antibodies to their site of action.

[0629] Methods for Restoring or Enhancing Target Gene Activity

[0630] Genes that cause a cancer may be underexpressed within the cancer. Alternatively, the activity of the protein products of such genes may be decreased, leading to the development of cancer. Such down-regulation of gene expression or decrease of protein activity might have a causative or exacerbating effect on the disease state.

[0631] In some cases, genes that are up-regulated in the disease state might be exerting a protective effect. A variety of techniques may be used to increase the expression, synthesis, or activity of genes and/or proteins that exert a protective effect in response to a cancer.

[0632] Described in this section are methods whereby the level of 140, 1470, 1686, 2089, 2427, 3702, 5891, 6428, 7181, 7660, 25641, 69583, 49863, 8897, 1682, 17667, 9235, 3703, 14171, 10359, 1660, 1450, 18894, 2088, 32427, 2160, 9252, 9389, 1642, 85269, 10297, 1584, 9525, 14124, 4469, 8990, 2100, 9288, 64698, 10480, 20893, 33230, 1586, 9943, 16334, 68862, 9011, 14031, 6178, 21225, 1420, 32236, 2099, 2150, 26583, 2784, 8941, 9811, 27444, 50566 or 66428 activity may be increased to levels wherein the symptoms of the cancer are ameliorated. The level of 140, 1470, 1686, 2089, 2427, 3702, 5891, 6428, 7181, 7660, 25641, 69583, 49863, 8897, 1682, 17667, 9235, 3703, 14171, 10359, 1660, 1450, 18894, 2088, 32427, 2160, 9252, 9389, 1642, 85269, 10297, 1584, 9525, 14124, 4469, 8990, 2100, 9288, 64698, 10480, 20893, 33230, 1586, 9943, 16334, 68862, 9011, 14031, 6178, 21225, 1420, 32236, 2099, 2150, 26583, 2784, 8941, 9811, 27444, 50566 or 66428 activity may be increased, for example, by either increasing the level of 140, 1470, 1686, 2089, 2427, 3702, 5891, 6428, 7181, 7660, 25641, 69583, 49863, 8897, 1682, 17667, 9235, 3703, 14171, 10359, 1660, 1450, 18894, 2088, 32427, 2160, 9252, 9389, 1642, 85269, 10297, 1584, 9525, 14124, 4469, 8990, 2100, 9288, 64698, 10480, 20893, 33230, 1586, 9943, 16334, 68862, 9011, 14031, 6178, 21225, 1420, 32236, 2099, 2150, 26583, 2784, 8941, 9811, 27444, 50566 or 66428 gene expression or by increasing the level of active 140, 1470, 1686, 2089, 2427, 3702, 5891, 6428, 7181, 7660, 25641, 69583, 49863, 8897, 1682, 17667, 9235, 3703, 14171, 10359, 1660, 1450, 18894, 2088, 32427, 2160, 9252, 9389, 1642, 85269, 10297, 1584, 9525, 14124, 4469, 8990, 2100, 9288, 64698, 10480, 20893, 33230, 1586, 9943, 16334, 68862, 9011, 14031, 6178, 21225, 1420, 32236, 2099, 2150, 26583, 2784, 8941, 9811, 27444, 50566 or 66428 protein which is present.

[0633] For example, a 140, 1470, 1686, 2089, 2427, 3702, 5891, 6428, 7181, 7660, 25641, 69583, 49863, 8897, 1682, 17667, 9235, 3703, 14171, 10359, 1660, 1450, 18894, 2088, 32427, 2160, 9252, 9389, 1642, 85269, 10297, 1584, 9525, 14124, 4469, 8990, 2100, 9288, 64698, 10480, 20893, 33230, 1586, 9943, 16334, 68862, 9011, 14031, 6178, 21225, 1420, 32236, 2099, 2150, 26583, 2784, 8941, 9811, 27444, 50566 or 66428 protein, at a level sufficient to ameliorate at least one symptom of a cancer may be administered to a patient exhibiting such symptoms. Any of the techniques discussed below may be used for such administration. One of skill in the art will readily know how to determine the concentration of effective, non-toxic doses of the 140, 1470, 1686, 2089, 2427, 3702, 5891, 6428, 7181, 7660, 25641, 69583, 49863, 8897, 1682, 17667, 9235, 3703, 14171, 10359, 1660, 1450, 18894, 2088, 32427, 2160, 9252, 9389, 1642, 85269, 10297, 1584, 9525, 14124, 4469, 8990, 2100, 9288, 64698, 10480, 20893, 33230, 1586, 9943, 16334, 68862, 9011, 14031, 6178, 21225, 1420, 32236, 2099, 2150, 26583, 2784, 8941, 9811, 27444, 50566 or 66428 protein, utilizing techniques such as those described below.

[0634] Additionally, RNA sequences encoding a 140, 1470, 1686, 2089, 2427, 3702, 5891, 6428, 7181, 7660, 25641, 69583, 49863, 8897, 1682, 17667, 9235, 3703, 14171, 10359, 1660, 1450, 18894, 2088, 32427, 2160, 9252, 9389, 1642, 85269, 10297, 1584, 9525, 14124, 4469, 8990, 2100, 9288, 64698, 10480, 20893, 33230, 1586, 9943, 16334, 68862, 9011, 14031, 6178, 21225, 1420, 32236, 2099, 2150, 26583, 2784, 8941, 9811, 27444, 50566 or 66428 protein may be directly administered to a patient exhibiting a cancer, at a concentration sufficient to produce a level of 140, 1470, 1686, 2089, 2427, 3702, 5891, 6428, 7181, 7660, 25641, 69583, 49863, 8897, 1682, 17667, 9235, 3703, 14171, 10359, 1660, 1450, 18894, 2088, 32427, 2160, 9252, 9389, 1642, 85269, 10297, 1584, 9525, 14124, 4469, 8990, 2100, 9288, 64698, 10480, 20893, 33230, 1586, 9943, 16334, 68862, 9011, 14031, 6178, 21225, 1420, 32236, 2099, 2150, 26583, 2784, 8941, 9811, 27444, 50566 or 66428 protein such that a cancer are ameliorated. Any of the techniques discussed below, which achieve intracellular administration of compounds, such as, for example, liposome administration, may be used for the administration of such RNA molecules. The RNA molecules may be produced, for example, by recombinant techniques such as those described herein.

[0635] Further, subjects may be treated by gene replacement therapy. One or more copies of a 140, 1470, 1686, 2089, 2427, 3702, 5891, 6428, 7181, 7660, 25641, 69583, 49863, 8897, 1682, 17667, 9235, 3703, 14171, 10359, 1660, 1450, 18894, 2088, 32427, 2160, 9252, 9389, 1642, 85269, 10297, 1584, 9525, 14124, 4469, 8990, 2100, 9288, 64698, 10480, 20893, 33230, 1586, 9943, 16334, 68862, 9011, 14031, 6178, 21225, 1420, 32236, 2099, 2150, 26583, 2784, 8941, 9811, 27444, 50566 or 66428 gene, or a portion thereof, that directs the production of a normal 140, 1470, 1686, 2089, 2427, 3702, 5891, 6428, 7181, 7660, 25641, 69583, 49863, 8897, 1682, 17667, 9235, 3703, 14171, 10359, 1660, 1450, 18894, 2088, 32427, 2160, 9252, 9389, 1642, 85269, 10297, 1584, 9525, 14124, 4469, 8990, 2100, 9288, 64698, 10480, 20893, 33230, 1586, 9943, 16334, 68862, 9011, 14031, 6178, 21225, 1420, 32236, 2099, 2150, 26583, 2784, 8941, 9811, 27444, 50566 or 66428 protein with 140, 1470, 1686, 2089, 2427, 3702, 5891, 6428, 7181, 7660, 25641, 69583, 49863, 8897, 1682, 17667, 9235, 3703, 14171, 10359, 1660, 1450, 18894, 2088, 32427, 2160, 9252, 9389, 1642, 85269, 10297, 1584, 9525, 14124, 4469, 8990, 2100, 9288, 64698, 10480, 20893, 33230, 1586, 9943, 16334, 68862, 9011, 14031, 6178, 21225, 1420, 32236, 2099, 2150, 26583, 2784, 8941, 9811, 27444, 50566 or 66428 function, may be inserted into cells using vectors which include, but are not limited to adenovirus, adeno-associated virus, and retrovirus vectors, in addition to other particles that introduce DNA into cells, such as liposomes. Additionally, techniques such as those described above may be used for the introduction of 140, 1470, 1686, 2089, 2427, 3702, 5891, 6428, 7181, 7660, 25641, 69583, 49863, 8897, 1682, 17667, 9235, 3703, 14171, 10359, 1660, 1450, 18894, 2088, 32427, 2160, 9252, 9389, 1642, 85269, 10297, 1584, 9525, 14124, 4469, 8990, 2100, 9288, 64698, 10480, 20893, 33230, 1586, 9943, 16334, 68862, 9011, 14031, 6178, 21225, 1420, 32236, 2099, 2150, 26583, 2784, 8941, 9811, 27444, 50566 or 66428 gene sequences into human cells.

[0636] Cells, preferably, autologous cells, containing 140, 1470, 1686, 2089, 2427, 3702, 5891, 6428, 7181, 7660, 25641, 69583, 49863, 8897, 1682, 17667, 9235, 3703, 14171, 10359, 1660, 1450, 18894, 2088, 32427, 2160, 9252, 9389, 1642, 85269, 10297, 1584, 9525, 14124, 4469, 8990, 2100, 9288, 64698, 10480, 20893, 33230, 1586, 9943, 16334, 68862, 9011, 14031, 6178, 21225, 1420, 32236, 2099, 2150, 26583, 2784, 8941, 9811, 27444, 50566 or 66428 expressing gene sequences may then be introduced or reintroduced into the subject at positions which allow for the amelioration of at least one symptom of a cancer. Such cell replacement techniques may be preferred, for example, when the gene product is a secreted, extracellular gene product.

[0637] Pharmaceutical Compositions

[0638] Another aspect of the invention pertains to methods for treating a subject suffering from a disease. These methods involve administering to a subject an agent which modulates 140, 1470, 1686, 2089, 2427, 3702, 5891, 6428, 7181, 7660, 25641, 69583, 49863, 8897, 1682, 17667, 9235, 3703, 14171, 10359, 1660, 1450, 18894, 2088, 32427, 2160, 9252, 9389, 1642, 85269, 10297, 1584, 9525, 14124, 4469, 8990, 2100, 9288, 64698, 10480, 20893, 33230, 1586, 9943, 16334, 68862, 9011, 14031, 6178, 21225, 1420, 32236, 2099, 2150, 26583, 2784, 8941, 9811, 27444, 50566 or 66428 expression or activity (e.g., an agent identified by a screening assay described herein), or a combination of such agents. In another embodiment, the method involves administering to a subject a 140, 1470, 1686, 2089, 2427, 3702, 5891, 6428, 7181, 7660, 25641, 69583, 49863, 8897, 1682, 17667, 9235, 3703, 14171, 10359, 1660, 1450, 18894, 2088, 32427, 2160, 9252, 9389, 1642, 85269, 10297, 1584, 9525, 14124, 4469, 8990, 2100, 9288, 64698, 10480, 20893, 33230, 1586, 9943, 16334, 68862, 9011, 14031, 6178, 21225, 1420, 32236, 2099, 2150, 26583, 2784, 8941, 9811, 27444, 50566 or 66428 protein or nucleic acid molecule as therapy to compensate for reduced, aberrant, or unwanted 140, 1470, 1686, 2089, 2427, 3702, 5891, 6428, 7181, 7660, 25641, 69583, 49863, 8897, 1682, 17667, 9235, 3703, 14171, 10359, 1660, 1450, 18894, 2088, 32427, 2160, 9252, 9389, 1642, 85269, 10297, 1584, 9525, 14124, 4469, 8990, 2100, 9288, 64698, 10480, 20893, 33230, 1586.9943, 16334, 68862, 9011, 14031, 6178, 21225, 1420, 32236, 2099, 2150, 26583, 2784, 8941, 9811, 27444, 50566 or 66428 expression or activity.

[0639] Stimulation of 140, 1470, 1686, 2089, 2427, 3702, 5891, 6428, 7181, 7660, 25641, 69583, 49863, 8897, 1682, 17667, 9235, 3703, 14171, 10359, 1660, 1450, 18894, 2088, 32427, 2160, 9252, 9389, 1642, 85269, 10297, 1584, 9525, 14124, 4469, 8990, 2100, 9288, 64698, 10480, 20893, 33230, 1586, 9943, 16334, 68862, 9011, 14031, 6178, 21225, 1420, 32236, 2099, 2150, 26583, 2784, 8941, 9811, 27444, 50566 or 66428 activity is desirable in situations in which 140, 1470, 1686, 2089, 2427, 3702, 5891, 6428, 7181, 7660, 25641, 69583, 49863, 8897, 1682, 17667, 9235, 3703, 14171, 10359, 1660, 1450, 18894, 2088, 32427, 2160, 9252, 9389, 1642, 85269, 10297, 1584, 9525, 14124, 4469, 8990, 2100, 9288, 64698, 10480, 20893, 33230, 1586, 9943, 16334, 68862, 9011, 14031, 6178, 21225, 1420, 32236, 2099, 2150, 26583, 2784, 8941, 9811, 27444, 50566 or 66428 is abnormally downregulated and/or in which increased 140, 1470, 1686, 2089, 2427, 3702, 5891, 6428, 7181, 7660, 25641, 69583, 49863, 8897, 1682, 17667, 9235, 3703, 14171, 10359, 1660, 1450, 18894, 2088, 32427, 2160, 9252, 9389, 1642, 85269, 10297, 1584, 9525, 14124, 4469, 8990, 2100, 9288, 64698, 10480, 20893, 33230, 1586, 9943, 16334, 68862, 9011, 14031, 6178, 21225, 1420, 32236, 2099, 2150, 26583, 2784, 8941, 9811, 27444, 50566 or 66428 activity is likely to have a beneficial effect. Likewise, inhibition of 140, 1470, 1686, 2089, 2427, 3702, 5891, 6428, 7181, 7660, 25641, 69583, 49863, 8897, 1682, 17667, 9235, 3703, 14171, 10359, 1660, 1450, 18894, 2088, 32427, 2160, 9252, 9389, 1642, 85269, 10297, 1584, 9525, 14124, 4469, 8990, 2100, 9288, 64698, 10480, 20893, 33230, 1586, 9943, 16334, 68862, 9011, 14031, 6178, 21225, 1420, 32236, 2099, 2150, 26583, 2784, 8941, 9811, 27444, 50566 or 66428 activity is desirable in situations in which 140, 1470, 1686, 2089, 2427, 3702, 5891, 6428, 7181, 7660, 25641, 69583, 49863, 8897, 1682, 17667, 9235, 3703, 14171, 10359, 1660, 1450, 18894, 2088, 32427, 2160, 9252, 9389, 1642, 85269, 10297, 1584, 9525, 14124, 4469, 8990, 2100, 9288, 64698, 10480, 20893, 33230, 1586, 9943, 16334, 68862, 9011, 14031, 6178, 21225, 1420, 32236, 2099, 2150, 26583, 2784, 8941, 9811, 27444, 50566 or 66428 is abnormally upregulated and/or in which decreased 140, 1470, 1686, 2089, 2427, 3702, 5891, 6428, 7181, 7660, 25641, 69583, 49863, 8897, 1682, 17667, 9235, 3703, 14171, 10359, 1660, 1450, 18894, 2088, 32427, 2160, 9252, 9389, 1642, 85269, 10297, 1584, 9525, 14124, 4469, 8990, 2100, 9288, 64698, 10480, 20893, 33230, 1586, 9943, 16334, 68862, 9011, 14031, 6178, 21225, 1420, 32236, 2099, 2150, 26583, 2784, 8941, 9811, 27444, 50566 or 66428 activity is likely to have a beneficial effect.

[0640] The agents which modulate 140, 1470, 1686, 2089, 2427, 3702, 5891, 6428, 7181, 7660, 25641, 69583, 49863, 8897, 1682, 17667, 9235, 3703, 14171, 10359, 1660, 1450, 18894, 2088, 32427, 2160, 9252, 9389, 1642, 85269, 10297, 1584, 9525, 14124, 4469, 8990, 2100, 9288, 64698, 10480, 20893, 33230, 1586, 9943, 16334, 68862, 9011, 14031, 6178, 21225, 1420, 32236, 2099, 2150, 26583, 2784, 8941, 9811, 27444, 50566 or 66428 activity can be administered to a subject using pharmaceutical compositions suitable for such administration. Such compositions typically comprise the agent (e.g., nucleic acid molecule, protein, or antibody) and a pharmaceutically acceptable carrier. As used herein the language “pharmaceutically acceptable carrier” is intended to include any and all solvents, dispersion media, coatings, antibacterial and antifungal agents, isotonic and absorption delaying agents, and the like, compatible with pharmaceutical administration. The use of such media and agents for pharmaceutically active substances is well known in the art. Except insofar as any conventional media or agent is incompatible with the active compound, use thereof in the compositions is contemplated. Supplementary active compounds can also be incorporated into the compositions.

[0641] A pharmaceutical composition used in the therapeutic methods of the invention is formulated to be compatible with its intended route of administration. Examples of routes of administration include parenteral, e.g., intravenous, intradermal, subcutaneous, oral (e.g., inhalation), transdermal (topical), transmucosal, and rectal administration. Solutions or suspensions used for parenteral, intradermal, or subcutaneous application can include the following components: a sterile diluent such as water for injection, saline solution, fixed oils, polyethylene glycols, glycerine, propylene glycol or other synthetic solvents; antibacterial agents such as benzyl alcohol or methyl parabens; antioxidants such as ascorbic acid or sodium bisulfite; chelating agents such as ethylenediaminetetraacetic acid; buffers such as acetates, citrates or phosphates and agents for the adjustment of tonicity such as sodium chloride or dextrose. pH can be adjusted with acids or bases, such as hydrochloric acid or sodium hydroxide. The parenteral preparation can be enclosed in ampoules, disposable syringes or multiple dose vials made of glass or plastic.

[0642] Pharmaceutical compositions suitable for injectable use include sterile aqueous solutions (where water soluble) or dispersions and sterile powders for the extemporaneous preparation of sterile injectable solutions or dispersion. For intravenous administration, suitable carriers include physiological saline, bacteriostatic water, Cremophor EL™ (BASF, Parsippany, N.J.) or phosphate buffered saline (PBS). In all cases, the composition must be sterile and should be fluid to the extent that easy syringability exists. It must be stable under the conditions of manufacture and storage and must be preserved against the contaminating action of microorganisms such as bacteria and fungi. The carrier can be a solvent or dispersion medium containing, for example, water, ethanol, polyol (for example, glycerol, propylene glycol, and liquid polyetheylene glycol, and the like), and suitable mixtures thereof. The proper fluidity can be maintained, for example, by the use of a coating such as lecithin, by the maintenance of the required particle size in the case of dispersion and by the use of surfactants. Prevention of the action of microorganisms can be achieved by various antibacterial and antifungal agents, for example, parabens, chlorobutanol, phenol, ascorbic acid, thimerosal, and the like. In many cases, it will be preferable to include isotonic agents, for example, sugars, polyalcohols such as manitol, sorbitol, and sodium chloride in the composition. Prolonged absorption of the injectable compositions can be brought about by including in the composition an agent which delays absorption, for example, aluminum monostearate and gelatin.

[0643] Sterile injectable solutions can be prepared by incorporating the agent that modulates 140, 1470, 1686, 2089, 2427, 3702, 5891, 6428, 7181, 7660, 25641, 69583, 49863, 8897, 1682, 17667, 9235, 3703, 14171, 10359, 1660, 1450, 18894, 2088, 32427, 2160, 9252, 9389, 1642, 85269, 10297, 1584, 9525, 14124, 4469, 8990, 2100, 9288, 64698, 10480, 20893, 33230, 1586, 9943, 16334, 68862, 9011, 14031, 6178, 21225, 1420, 32236, 2099, 2150, 26583, 2784, 8941, 9811, 27444, 50566 or 66428 activity (e.g., a fragment of a 140, 1470, 1686, 2089, 2427, 3702, 5891, 6428, 7181, 7660, 25641, 69583, 49863, 8897, 1682, 17667, 9235, 3703, 14171, 10359, 1660, 1450, 18894, 2088, 32427, 2160, 9252, 9389, 1642, 85269, 10297, 1584, 9525, 14124, 4469, 8990, 2100, 9288, 64698, 10480, 20893, 33230, 1586, 9943, 16334, 68862, 9011, 14031, 6178, 21225, 1420, 32236, 2099, 2150, 26583, 2784, 8941, 9811, 27444, 50566 or 66428 protein or an anti-140, 1470, 1686, 2089, 2427, 3702, 5891, 6428, 7181, 7660, 25641, 69583, 49863, 8897, 1682, 17667, 9235, 3703, 14171, 10359, 1660, 1450, 18894, 2088, 32427, 2160, 9252, 9389, 1642, 85269, 10297, 1584, 9525, 14124, 4469, 8990, 2100, 9288, 64698, 10480, 20893, 33230, 1586, 9943, 16334, 68862, 9011, 14031, 6178, 21225, 1420, 32236, 2099, 2150, 26583, 2784, 8941, 9811, 27444, 50566 or 66428 antibody) in the required amount in an appropriate solvent with one or a combination of ingredients enumerated above, as required, followed by filtered sterilization. Generally, dispersions are prepared by incorporating the active compound into a sterile vehicle which contains a basic dispersion medium and the required other ingredients from those enumerated above. In the case of sterile powders for the preparation of sterile injectable solutions, the preferred methods of preparation are vacuum drying and freeze-drying which yields a powder of the active ingredient plus any additional desired ingredient from a previously sterile-filtered solution thereof.

[0644] Oral compositions generally include an inert diluent or an edible carrier. They can be enclosed in gelatin capsules or compressed into tablets. For the purpose of oral therapeutic administration, the active compound can be incorporated with excipients and used in the form of tablets, troches, or capsules. Oral compositions can also be prepared using a fluid carrier for use as a mouthwash, wherein the compound in the fluid carrier is applied orally and swished and expectorated or swallowed. Pharmaceutically compatible binding agents, and/or adjuvant materials can be included as part of the composition. The tablets, pills, capsules, troches and the like can contain any of the following ingredients, or compounds of a similar nature: a binder such as microcrystalline cellulose, gum tragacanth or gelatin; an excipient such as starch or lactose, a disintegrating agent such as alginic acid, Primogel, or corn starch; a lubricant such as magnesium stearate or Sterotes; a glidant such as colloidal silicon dioxide; a sweetening agent such as sucrose or saccharin; or a flavoring agent such as peppermint, methyl salicylate, or orange flavoring.

[0645] For administration by inhalation, the compounds are delivered in the form of an aerosol spray from pressured container or dispenser which contains a suitable propellant, e.g., a gas such as carbon dioxide, or a nebulizer.

[0646] Systemic administration can also be by transmucosal or transdermal means. For transmucosal or transdermal administration, penetrants appropriate to the barrier to be permeated are used in the formulation. Such penetrants are generally known in the art, and include, for example, for transmucosal administration, detergents, bile salts, and fusidic acid derivatives. Transmucosal administration can be accomplished through the use of nasal sprays or suppositories. For transdermal administration, the active compounds are formulated into ointments, salves, gels, or creams as generally known in the art.

[0647] The agents that modulate 140, 1470, 1686, 2089, 2427, 3702, 5891, 6428, 7181, 7660, 25641, 69583, 49863, 8897, 1682, 17667, 9235, 3703, 14171, 10359, 1660, 1450, 18894, 2088, 32427, 2160, 9252, 9389, 1642, 85269, 10297, 1584, 9525, 14124, 4469, 8990, 2100, 9288, 64698, 10480, 20893, 33230, 1586, 9943, 16334, 68862, 9011, 14031, 6178, 21225, 1420, 32236, 2099, 2150, 26583, 2784, 8941, 9811, 27444, 50566 or 66428 activity can also be prepared in the form of suppositories (e.g., with conventional suppository bases such as cocoa butter and other glycerides) or retention enemas for rectal delivery.

[0648] In one embodiment, the agents that modulate 140, 1470, 1686, 2089, 2427, 3702, 5891, 6428, 7181, 7660, 25641, 69583, 49863, 8897, 1682, 17667, 9235, 3703, 14171, 10359, 1660, 1450, 18894, 2088, 32427, 2160, 9252, 9389, 1642, 85269, 10297, 1584, 9525, 14124, 4469, 8990, 2100, 9288, 64698, 10480, 20893, 33230, 1586, 9943, 16334, 68862, 9011, 14031, 6178, 21225, 1420, 32236, 2099, 2150, 26583, 2784, 8941, 9811, 27444, 50566 or 66428 activity are prepared with carriers that will protect the compound against rapid elimination from the body, such as a controlled release formulation, including implants and microencapsulated delivery systems. Biodegradable, biocompatible polymers can be used, such as ethylene vinyl acetate, polyanhydrides, polyglycolic acid, collagen, polyorthoesters, and polylactic acid. Methods for preparation of such formulations will be apparent to those skilled in the art. The materials can also be obtained commercially from Alza Corporation and Nova Pharmaceuticals, Inc. Liposomal suspensions (including liposomes targeted to infected cells with monoclonal antibodies to viral antigens) can also be used as pharmaceutically acceptable carriers. These can be prepared according to methods known to those skilled in the art, for example, as described in U.S. Pat. No. 4,522,811.

[0649] It is especially advantageous to formulate oral or parenteral compositions in dosage unit form for ease of administration and uniformity of dosage. Dosage unit form as used herein refers to physically discrete units suited as unitary dosages for the subject to be treated; each unit containing a predetermined quantity of active compound calculated to produce the desired therapeutic effect in association with the required pharmaceutical carrier. The specification for the dosage unit forms of the invention are dictated by and directly dependent on the unique characteristics of the agent that modulates 140, 1470, 1686, 2089, 2427, 3702, 5891, 6428, 7181, 7660, 25641, 69583, 49863, 8897, 1682, 17667, 9235, 3703, 14171, 10359, 1660, 1450, 18894, 2088, 32427, 2160, 9252, 9389, 1642, 85269, 10297, 1584, 9525, 14124, 4469, 8990, 2100, 9288, 64698, 10480, 20893, 33230, 1586, 9943, 16334, 68862, 9011, 14031, 6178, 21225, 1420, 32236, 2099, 2150, 26583, 2784, 8941, 9811, 27444, 50566 or 66428 activity and the particular therapeutic effect to be achieved, and the limitations inherent in the art of compounding such an agent for the treatment of subjects.

[0650] Toxicity and therapeutic efficacy of such agents can be determined by standard pharmaceutical procedures in cell cultures or experimental animals, e.g., for determining the LD50 (the dose lethal to 50% of the population) and the ED50 (the dose therapeutically effective in 50% of the population). The dose ratio between toxic and therapeutic effects is the therapeutic index and can be expressed as the ratio LD50/FD50. Agents which exhibit large therapeutic indices are preferred. While agents that exhibit toxic side effects may be used, care should be taken to design a delivery system that targets such agents to the site of affected tissue in order to minimize potential damage to uninfected cells and, thereby, reduce side effects.

[0651] The data obtained from the cell culture assays and animal studies can be used in formulating a range of dosage for use in humans. The dosage of such 140, 1470, 1686, 2089, 2427, 3702, 5891, 6428, 7181, 7660, 25641, 69583, 49863, 8897, 1682, 17667, 9235, 3703, 14171, 10359, 1660, 1450, 18894, 2088, 32427, 2160, 9252, 9389, 1642, 85269, 10297, 1584, 9525, 14124, 4469, 8990, 2100, 9288, 64698, 10480, 20893, 33230, 1586, 9943, 16334, 68862, 9011, 14031, 6178, 21225, 1420, 32236, 2099, 2150, 26583, 2784, 8941, 9811, 27444, 50566 or 66428 modulating agents lies preferably within a range of circulating concentrations that include the ED50 with little or no toxicity. The dosage may vary within this range depending upon the dosage form employed and the route of administration utilized. For any agent used in the therapeutic methods of the invention, the therapeutically effective dose can be estimated initially from cell culture assays. A dose may be formulated in animal models to achieve a circulating plasma concentration range that includes the IC50 (i.e., the concentration of the test compound which achieves a half-maximal inhibition of symptoms) as determined in cell culture. Such information can be used to more accurately determine useful doses in humans. Levels in plasma may be measured, for example, by high performance liquid chromatography.

[0652] As defined herein, a therapeutically effective amount of protein or polypeptide (i.e., an effective dosage) ranges from about 0.001 to 30 mg/kg body weight, preferably about 0.01 to 25 mg/kg body weight, more preferably about 0.1 to 20 mg/kg body weight, and even more preferably about 1 to 10 mg/kg, 2 to 9 mg/kg, 3 to 8 mg/kg, 4 to 7 mg/kg, or 5 to 6 mg/kg body weight. The skilled artisan will appreciate that certain factors may influence the dosage required to effectively treat a subject, including but not limited to the severity of the disease or disorder, previous treatments, the general health and/or age of the subject, and other diseases present. Moreover, treatment of a subject with a therapeutically effective amount of a protein, polypeptide, or antibody can include a single treatment or, preferably, can include a series of treatments.

[0653] In a preferred example, a subject is treated with antibody, protein, or polypeptide in the range of between about 0.1 to 20 mg/kg body weight, one time per week for between about 1 to 10 weeks, preferably between 2 to 8 weeks, more preferably between about 3 to 7 weeks, and even more preferably for about 4, 5, or 6 weeks. It will also be appreciated that the effective dosage of antibody, protein, or polypeptide used for treatment may increase or decrease over the course of a particular treatment. Changes in dosage may result and become apparent from the results of diagnostic assays as described herein.

[0654] The present invention encompasses agents which modulate expression or activity. An agent may, for example, be a small molecule. For example, such small molecules include, but are not limited to, peptides, peptidomimetics, amino acids, amino acid analogs, polynucleotides, polynucleotide analogs, nucleotides, nucleotide analogs, organic or inorganic compounds (i.e., including heteroorganic and organometallic compounds) having a molecular weight less than about 10,000 grams per mole, organic or inorganic compounds having a molecular weight less than about 5,000 grams per mole, organic or inorganic compounds having a molecular weight less than about 1,000 grams per mole, organic or inorganic compounds having a molecular weight less than about 500 grams per mole, and salts, esters, and other pharmaceutically acceptable forms of such compounds. It is understood that appropriate doses of small molecule agents depends upon a number of factors within the ken of the ordinarily skilled physician, veterinarian, or researcher. The dose(s) of the small molecule will vary, for example, depending upon the identity, size, and condition of the subject or sample being treated, further depending upon the route by which the composition is to be administered, if applicable, and the effect which the practitioner desires the small molecule to have upon the nucleic acid or polypeptide of the invention.

[0655] Exemplary doses include milligram or microgram amounts of the small molecule per kilogram of subject or sample weight (e.g., about 1 microgram per kilogram to about 500 milligrams per kilogram, about 100 micrograms per kilogram to about 5 milligrams per kilogram, or about 1 microgram per kilogram to about 50 micrograms per kilogram). It is furthermore understood that appropriate doses of a small molecule depend upon the potency of the small molecule with respect to the expression or activity to be modulated. Such appropriate doses may be determined using the assays described herein. When one or more of these small molecules is to be administered to an animal (e.g., a human) in order to modulate expression or activity of a polypeptide or nucleic acid of the invention, a physician, veterinarian, or researcher may, for example, prescribe a relatively low dose at first, subsequently increasing the dose until an appropriate response is obtained. In addition, it is understood that the specific dose level for any particular animal subject will depend upon a variety of factors including the activity of the specific compound employed, the age, body weight, general health, gender, and diet of the subject, the time of administration, the route of administration, the rate of excretion, any drug combination, and the degree of expression or activity to be modulated.

[0656] Further, an antibody (or fragment thereof) may be conjugated to a therapeutic moiety such as a cytotoxin, a therapeutic agent or a radioactive metal ion. A cytotoxin or cytotoxic agent includes any agent that is detrimental to cells. Examples include taxol, cytochalasin B, gramicidin D, ethidium bromide, emetine, mitomycin, etoposide, tenoposide, vincristine, vinblastine, colchicin, doxorubicin, daunorubicin, dihydroxy anthracin dione, mitoxantrone, mithramycin, actinomycin D, 1-dehydrotestosterone, glucocorticoids, procaine, tetracaine, lidocaine, propranolol, and puromycin and analogs or homologs thereof. Therapeutic agents include, but are not limited to, antimetabolites (e.g., methotrexate, 6-mercaptopurine, 6-thioguanine, cytarabine, 5-fluorouracil decarbazine), alkylating agents (e.g., mechlorethamine, thioepa chlorambucil, melphalan, carmustine (BSNU) and lomustine (CCNU), cyclothosphamide, busulfan, dibromomannitol, streptozotocin, mitomycin C, and cis-dichlorodiamine platinum (II) (DDP) cisplatin), anthracyclines (e.g., daunorubicin (formerly daunomycin) and doxorubicin), antibiotics (e.g., dactinomycin (formerly actinomycin), bleomycin, mithramycin, and anthramycin (AMC)), and anti-mitotic agents (e.g., vincristine and vinblastine).

[0657] The conjugates of the invention can be used for modifying a given biological response, the drug moiety is not to be construed as limited to classical chemical therapeutic agents. For example, the drug moiety may be a protein or polypeptide possessing a desired biological activity. Such proteins may include, for example, a toxin such as abrin, ricin A, pseudomonas exotoxin, or diphtheria toxin; a protein such as tumor necrosis factor, alpha-interferon, beta-interferon, nerve growth factor, platelet derived growth factor, tissue plasminogen activator; or biological response modifiers such as, for example, lymphokines, interleukin-1 (“IL-1”), interleukin-2 (“IL-2”), interleukin-6 (“IL-6”), granulocyte macrophase colony stimulating factor (“GM-CSF”), granulocyte colony stimulating factor (“G-CSF”), or other growth factors.

[0658] Techniques for conjugating such therapeutic moiety to antibodies are well known, see, e.g., Arnon et al., “Monoclonal Antibodies For Immunotargeting Of Drugs In Cancer Therapy”, in Monoclonal Antibodies And Cancer Therapy, Reisfeld et al. (eds.), pp. 243-56 (Alan R. Liss, Inc. 1985); Hellstrom et al., “Antibodies For Drug Delivery”, in Controlled Drug Delivery (2^{nd} Ed.), Robinson et al. (eds.), pp. 623-53 (Marcel Dekker, Inc. 1987); Thorpe, “Antibody Carriers Of Cytotoxic Agents In Cancer Therapy: A Review”, in Monoclonal Antibodies '84: Biological And Clinical Applications, Pinchera et al. (eds.), pp. 475-506 (1985); “Analysis, Results, And Future Prospective Of The Therapeutic Use Of Radiolabeled Antibody In Cancer Therapy”, in Monoclonal Antibodies For Cancer Detection And Therapy, Baldwin et al. (eds.), pp. 303-16 (Academic Press 1985), and Thorpe et al., “The Preparation And Cytotoxic Properties Of Antibody-Toxin Conjugates”, Immunol. Rev., 62:119-58 (1982). Alternatively, an antibody can be conjugated to a second antibody to form an antibody heteroconjugate as described by Segal in U.S. Pat. No. 4,676,980.

[0659] The nucleic acid molecules used in the methods of the invention can be inserted into vectors and used as gene therapy vectors. Gene therapy vectors can be delivered to a subject by, for example, intravenous injection, local administration (see U.S. Pat. No. 5,328,470) or by stereotactic injection (see, e.g., Chen et al. (1994) Proc. Natl. Acad. Sci. USA 91:3054-3057). The pharmaceutical preparation of the gene therapy vector can include the gene therapy vector in an acceptable diluent, or can comprise a slow release matrix in which the gene delivery vehicle is imbedded. Alternatively, where the complete gene delivery vector can be produced intact from recombinant cells, e.g., retroviral vectors, the pharmaceutical preparation can include one or more cells which produce the gene delivery system.

[0660] Pharmacogenomics

[0661] In conjunction with the therapeutic methods of the invention, pharmacogenomics (i.e., the study of the relationship between a subject's genotype and that subject's response to a foreign compound or drug) may be considered. Differences in metabolism of therapeutics can lead to severe toxicity or therapeutic failure by altering the relation between dose and blood concentration of the pharmacologically active drug. Thus, a physician or clinician may consider applying knowledge obtained in relevant pharmacogenomics studies in determining whether to administer an agent which modulates 140, 1470, 1686, 2089, 2427, 3702, 5891, 6428, 7181, 7660, 25641, 69583, 49863, 8897, 1682, 17667, 9235, 3703, 14171, 10359, 1660, 1450, 18894, 2088, 32427, 2160, 9252, 9389, 1642, 85269, 10297, 1584, 9525, 14124, 4469, 8990, 2100, 9288, 64698, 10480, 20893, 33230, 1586, 9943, 16334, 68862, 9011, 14031, 6178, 21225, 1420, 32236, 2099, 2150, 26583, 2784, 8941, 9811, 27444, 50566 or 66428 activity, as well as tailoring the dosage and/or therapeutic regimen of treatment with an agent which modulates 140, 1470, 1686, 2089, 2427, 3702, 5891, 6428, 7181, 7660, 25641, 69583, 49863, 8897, 1682, 17667, 9235, 3703, 14171, 10359, 1660, 1450, 18894, 2088, 32427, 2160, 9252, 9389, 1642, 85269, 10297, 1584, 9525, 14124, 4469, 8990, 2100, 9288, 64698, 10480, 20893, 33230, 1586, 9943, 16334, 68862, 9011, 14031, 6178, 21225, 1420, 32236, 2099, 2150, 26583, 2784, 8941, 9811, 27444, 50566 or 66428 activity.

[0662] Pharmacogenomics deals with clinically significant hereditary variations in the response to drugs due to altered drug disposition and abnormal action in affected persons. See, for example, Eichelbaum, M. et al. (1996) Clin. Exp. Pharmacol. Physiol. 23(10-11): 983-985 and Linder, M. W. et al. (1997) Clin. Chem. 43(2):254-266. In general, two types of pharmacogenetic conditions can be differentiated. Genetic conditions transmitted as a single factor altering the way drugs act on the body (altered drug action) or genetic conditions transmitted as single factors altering the way the body acts on drugs (altered drug metabolism). These pharmacogenetic conditions can occur either as rare genetic defects or as naturally-occurring polymorphisms. For example, glucose-6-phosphate aminopeptidase deficiency (G6PD) is a common inherited enzymopathy in which the main clinical complication is haemolysis after ingestion of oxidant drugs (anti-malarials, sulfonamides, analgesics, nitrofurans) and consumption of fava beans.

[0663] One pharmacogenomics approach to identifying genes that predict drug response, known as “a genome-wide association”, relies primarily on a high-resolution map of the human genome consisting of already known gene-related markers (e.g., a “bi-allelic” gene marker map which consists of 60,000-100,000 polymorphic or variable sites on the human genome, each of which has two variants). Such a high-resolution genetic map can be compared to a map of the genome of each of a statistically significant number of patients taking part in a Phase II/III drug trial to identify markers associated with a particular observed drug response or side effect. Alternatively, such a high resolution map can be generated from a combination of some ten million known single nucleotide polymorphisms (SNPs) in the human genome. As used herein, a “SNP” is a common alteration that occurs in a single nucleotide base in a stretch of DNA. For example, a SNP may occur once per every 1000 bases of DNA. A SNP may be involved in a disease process, however, the vast majority may not be disease-associated. Given a genetic map based on the occurrence of such SNPs, individuals can be grouped into genetic categories depending on a particular pattern of SNPs in their individual genome. In such a manner, treatment regimens can be tailored to groups of genetically similar individuals, taking into account traits that may be common among such genetically similar individuals.

[0664] Alternatively, a method termed the “candidate gene approach” can be utilized to identify genes that predict drug response. According to this method, if a gene that encodes a drug target is known (e.g., a 140, 1470, 1686, 2089, 2427, 3702, 5891, 6428, 7181, 7660, 25641, 69583, 49863, 8897, 1682, 17667, 9235, 3703, 14171, 10359, 1660, 1450, 18894, 2088, 32427, 2160, 9252, 9389, 1642, 85269, 10297, 1584, 9525, 14124, 4469, 8990, 2100, 9288, 64698, 10480, 20893, 33230, 1586, 9943, 16334, 68862, 9011, 14031, 6178, 21225, 1420, 32236, 2099, 2150, 26583, 2784, 8941, 9811, 27444, 50566 or 66428 protein used in the methods of the present invention), all common variants of that gene can be fairly easily identified in the population and it can be determined if having one version of the gene versus another is associated with a particular drug response.

[0665] As an illustrative embodiment, the activity of drug metabolizing enzymes is a major determinant of both the intensity and duration of drug action. The discovery of genetic polymorphisms of drug metabolizing enzymes (e.g., N-acetyltransferase 2 (NAT 2) and the cytochrome P450 enzymes CYP2D6 and CYP2C19) has provided an explanation as to why some patients do not obtain the expected drug effects or show exaggerated drug response and serious toxicity after taking the standard and safe dose of a drug. These polymorphisms are expressed in two phenotypes in the population, the extensive metabolizer (EM) and poor metabolizer (PM). The prevalence of PM is different among different populations. For example, the gene coding for CYP2D6 is highly polymorphic and several mutations have been identified in PM, which all lead to the absence of functional CYP2D6. Poor metabolizers of CYP2D6 and CYP2C19 quite frequently experience exaggerated drug response and side effects when they receive standard doses. If a metabolite is the active therapeutic moiety, PM show no therapeutic response, as demonstrated for the analgesic effect of codeine mediated by its CYP2D6-formed metabolite morphine. The other extreme are the so called ultra-rapid metabolizers who do not respond to standard doses. Recently, the molecular basis of ultra-rapid metabolism has been identified to be due to CYP2D6 gene amplification.

[0666] Alternatively, a method termed the “gene expression profiling” can be utilized to identify genes that predict drug response. For example, the gene expression of an animal dosed with a drug (e.g., a 140, 1470, 1686, 2089, 2427, 3702, 5891, 6428, 7181, 7660, 25641, 69583, 49863, 8897, 1682, 17667, 9235, 3703, 14171, 10359, 1660, 1450, 18894, 2088, 32427, 2160, 9252, 9389, 1642, 85269, 10297, 1584, 9525, 14124, 4469, 8990, 2100, 9288, 64698, 10480, 20893, 33230, 1586, 9943, 16334, 68862, 9011, 14031, 6178, 21225, 1420, 32236, 2099, 2150, 26583, 2784, 8941, 9811, 27444, 50566 or 66428 molecule or 140, 1470, 1686, 2089, 2427, 3702, 5891, 6428, 7181, 7660, 25641, 69583, 49863, 8897, 1682, 17667, 9235, 3703, 14171, 10359, 1660, 1450, 18894, 2088, 32427, 2160, 9252, 9389, 1642, 85269, 10297, 1584, 9525, 14124, 4469, 8990, 2100, 9288, 64698, 10480, 20893, 33230, 1586, 9943, 16334, 68862, 9011, 14031, 6178, 21225, 1420, 32236, 2099, 2150, 26583, 2784, 8941, 9811, 27444, 50566 or 66428 modulator used in the methods of the present invention) can give an indication whether gene pathways related to toxicity have been turned on.

[0667] Information generated from more than one of the above pharmacogenomics approaches can be used to determine appropriate dosage and treatment regimens for prophylactic or therapeutic treatment of a subject. This knowledge, when applied to dosing or drug selection, can avoid adverse reactions or therapeutic failure and, thus, enhance therapeutic or prophylactic efficiency when treating a subject suffering from a cancer, with an agent which modulates 140, 1470, 1686, 2089, 2427, 3702, 5891, 6428, 7181, 7660, 25641, 69583, 49863, 8897, 1682, 17667, 9235, 3703, 14171, 10359, 1660, 1450, 18894, 2088, 32427, 2160, 9252, 9389, 1642, 85269, 10297, 1584, 9525, 14124, 4469, 8990, 2100, 9288, 64698, 10480, 20893, 33230, 1586, 9943, 16334, 68862, 9011, 14031, 6178, 21225, 1420, 32236, 2099, 2150, 26583, 2784, 8941, 9811, 27444, 50566 or 66428 activity.

[0668] Recombinant Expression Vectors and Host Cells Used in the Methods of the Invention

[0669] The methods of the invention (e.g., the screening assays described herein) include the use of vectors, preferably expression vectors, containing a nucleic acid encoding a 140, 1470, 1686, 2089, 2427, 3702, 5891, 6428, 7181, 7660, 25641, 69583, 49863, 8897, 1682, 17667, 9235, 3703, 14171, 10359, 1660, 1450, 18894, 2088, 32427, 2160, 9252, 9389, 1642, 85269, 10297, 1584, 9525, 14124, 4469, 8990, 2100, 9288, 64698, 10480, 20893, 33230, 1586, 9943, 16334, 68862, 9011, 14031, 6178, 21225, 1420, 32236, 2099, 2150, 26583, 2784, 8941, 9811, 27444, 50566 or 66428 protein (or a portion thereof). As used herein, the term “vector” refers to a nucleic acid molecule capable of transporting another nucleic acid to which it has been linked. One type of vector is a “plasmid”, which refers to a circular double stranded DNA loop into which additional DNA segments can be ligated. Another type of vector is a viral vector, wherein additional DNA segments can be ligated into the viral genome. Certain vectors are capable of autonomous replication in a host cell into which they are introduced (e.g., bacterial vectors having a bacterial origin of replication and episomal mammalian vectors). Other vectors (e.g., non-episomal mammalian vectors) are integrated into the genome of a host cell upon introduction into the host cell, and thereby are replicated along with the host genome. Moreover, certain vectors are capable of directing the expression of genes to which they are operatively linked. Such vectors are referred to herein as “expression vectors”. In general, expression vectors of utility in recombinant DNA techniques are often in the form of plasmids. In the present specification, “plasmid” and “vector” can be used interchangeably as the plasmid is the most commonly used form of vector. However, the invention is intended to include such other forms of expression vectors, such as viral vectors (e.g., replication defective retroviruses, adenoviruses and adeno-associated viruses), which serve equivalent functions.

[0670] The recombinant expression vectors to be used in the methods of the invention comprise a nucleic acid of the invention in a form suitable for expression of the nucleic acid in a host cell, which means that the recombinant expression vectors include one or more regulatory sequences, selected on the basis of the host cells to be used for expression, which is operatively linked to the nucleic acid sequence to be expressed. Within a recombinant expression vector, “operably linked” is intended to mean that the nucleotide sequence of interest is linked to the regulatory sequence(s) in a manner which allows for expression of the nucleotide sequence (e.g., in an in vitro transcription/translation system or in a host cell when the vector is introduced into the host cell). The term “regulatory sequence” is intended to include promoters, enhancers and other expression control elements (e.g., polyadenylation signals). Such regulatory sequences are described, for example, in Goeddel (1990) Methods Enzymol. 185:3-7. Regulatory sequences include those which direct constitutive expression of a nucleotide sequence in many types of host cells and those which direct expression of the nucleotide sequence only in certain host cells (e.g., tissue-specific regulatory sequences). It will be appreciated by those skilled in the art that the design of the expression vector can depend on such factors as the choice of the host cell to be transformed, the level of expression of protein desired, and the like. The expression vectors of the invention can be introduced into host cells to thereby produce proteins or peptides, including fusion proteins or peptides, encoded by nucleic acids as described herein (e.g., 140, 1470, 1686, 2089, 2427, 3702, 5891, 6428, 7181, 7660, 25641, 69583, 49863, 8897, 1682, 17667, 9235, 3703, 14171, 10359, 1660, 1450, 18894, 2088, 32427, 2160, 9252, 9389, 1642, 85269, 10297, 1584, 9525, 14124, 4469, 8990, 2100, 9288, 64698, 10480, 20893, 33230, 1586, 9943, 16334, 68862, 9011, 14031, 6178, 21225, 1420, 32236, 2099, 2150, 26583, 2784, 8941, 9811, 27444, 50566 or 66428 proteins, mutant forms of 140, 1470, 1686, 2089, 2427, 3702, 5891, 6428, 7181, 7660, 25641, 69583, 49863, 8897, 1682, 17667, 9235, 3703, 14171, 10359, 1660, 1450, 18894, 2088, 32427, 2160, 9252, 9389, 1642, 85269, 10297, 1584, 9525, 14124, 4469, 8990, 2100, 9288, 64698, 10480, 20893, 33230, 1586, 9943, 16334, 68862, 9011, 14031, 6178, 21225, 1420, 32236, 2099, 2150, 26583, 2784, 8941, 9811, 27444, 50566 or 66428 proteins, fusion proteins, and the like).

[0671] The recombinant expression vectors to be used in the methods of the invention can be designed for expression of 140, 1470, 1686, 2089, 2427, 3702, 5891, 6428, 7181, 7660, 25641, 69583, 49863, 8897, 1682, 17667, 9235, 3703, 14171, 10359, 1660, 1450, 18894, 2088, 32427, 2160, 9252, 9389, 1642, 85269, 10297, 1584, 9525, 14124, 4469, 8990, 2100, 9288, 64698, 10480, 20893, 33230, 1586, 9943, 16334, 68862, 9011, 14031, 6178, 21225, 1420, 32236, 2099, 2150, 26583, 2784, 8941, 9811, 27444, 50566 or 66428 proteins in prokaryotic or eukaryotic cells. For example, 140, 1470, 1686, 2089, 2427, 3702, 5891, 6428, 7181, 7660, 25641, 69583, 49863, 8897, 1682, 17667, 9235, 3703, 14171, 10359, 1660, 1450, 18894, 2088, 32427, 2160, 9252, 9389, 1642, 85269, 10297, 1584, 9525, 14124, 4469, 8990, 2100, 9288, 64698, 10480, 20893, 33230, 1586, 9943, 16334, 68862, 9011, 14031, 6178, 21225, 1420, 32236, 2099, 2150, 26583, 2784, 8941, 9811, 27444, 50566 or 66428 proteins can be expressed in bacterial cells such as E. coli, insect cells (using baculovirus expression vectors), yeast cells, or mammalian cells. Suitable host cells are discussed further in Goeddel (1990) supra. Alternatively, the recombinant expression vector can be transcribed and translated in vitro, for example using T7 promoter regulatory sequences and T7 polymerase.

[0672] Expression of proteins in prokaryotes is most often carried out in E. coli with vectors containing constitutive or inducible promoters directing the expression of either fusion or non-fusion proteins. Fusion vectors add a number of amino acids to a protein encoded therein, usually to the amino terminus of the recombinant protein. Such fusion vectors typically serve three purposes: 1) to increase expression of recombinant protein; 2) to increase the solubility of the recombinant protein; and 3) to aid in the purification of the recombinant protein by acting as a ligand in affinity purification. Often, in fusion expression vectors, a proteolytic cleavage site is introduced at the junction of the fusion moiety and the recombinant protein to enable separation of the recombinant protein from the fusion moiety subsequent to purification of the fusion protein. Such enzymes, and their cognate recognition sequences, include Factor Xa, thrombin and enterokinase. Typical fusion expression vectors include pGEX (Pharmacia Biotech Inc; Smith, D. B. and Johnson, K. S. (1988) Gene 67:31-40), pMAL (New England Biolabs, Beverly, Mass.) and pRIT5 (Pharmacia, Piscataway, N.J.) which fuse glutathione S-transferase (GST), maltose E binding protein, or protein A, respectively, to the target recombinant protein.

[0673] Purified fusion proteins can be utilized in 140, 1470, 1686, 2089, 2427, 3702, 5891, 6428, 7181, 7660, 25641, 69583, 49863, 8897, 1682, 17667, 9235, 3703, 14171, 10359, 1660, 1450, 18894, 2088, 32427, 2160, 9252, 9389, 1642, 85269, 10297, 1584, 9525, 14124, 4469, 8990, 2100, 9288, 64698, 10480, 20893, 33230, 1586, 9943, 16334, 68862, 9011, 14031, 6178, 21225, 1420, 32236, 2099, 2150, 26583, 2784, 8941, 9811, 27444, 50566 or 66428 activity assays, (e.g., direct assays or competitive assays described in detail below), or to generate antibodies specific for 140, 1470, 1686, 2089, 2427, 3702, 5891, 6428, 7181, 7660, 25641, 69583, 49863, 8897, 1682, 17667, 9235, 3703, 14171, 10359, 1660, 1450, 18894, 2088, 32427, 2160, 9252, 9389, 1642, 85269, 10297, 1584, 9525, 14124, 4469, 8990, 2100, 9288, 64698, 10480, 20893, 33230, 1586, 9943, 16334, 68862, 9011, 14031, 6178, 21225, 1420, 32236, 2099, 2150, 26583, 2784, 8941, 9811, 27444, 50566 or 66428 proteins. In a preferred embodiment, a 140, 1470, 1686, 2089, 2427, 3702, 5891, 6428, 7181, 7660, 25641, 69583, 49863, 8897, 1682, 17667, 9235, 3703, 14171, 10359, 1660, 1450, 18894, 2088, 32427, 2160, 9252, 9389, 1642, 85269, 10297, 1584, 9525, 14124, 4469, 8990, 2100, 9288, 64698, 10480, 20893, 33230, 1586, 9943, 16334, 68862, 9011, 14031, 6178, 21225, 1420, 32236, 2099, 2150, 26583, 2784, 8941, 9811, 27444, 50566 or 66428 fusion protein expressed in a retroviral expression vector of the present invention can be utilized to infect bone marrow cells which are subsequently transplanted into irradiated recipients. The pathology of the subject recipient is then examined after sufficient time has passed (e.g., six weeks).

[0674] In another embodiment, a nucleic acid of the invention is expressed in mammalian cells using a mammalian expression vector. Examples of mammalian expression vectors include pCDM8 (Seed, B. (1987) Nature 329:840) and pMT2PC (Kaufman et al. (1987) EMBO J. 6:187-195). When used in mammalian cells, the expression vector's control functions are often provided by viral regulatory elements. For example, commonly used promoters are derived from polyoma, Adenovirus 2, cytomegalovirus and Simian Virus 40. For other suitable expression systems for both prokaryotic and eukaryotic cells see chapters 16 and 17 of Sambrook, J. et al., Molecular Cloning: A Laboratory Manual. 2^{nd} ed., Cold Spring Harbor Laboratory, Cold Spring Harbor Laboratory Press, Cold Spring Harbor, N.Y., 1989.

[0675] In another embodiment, the recombinant mammalian expression vector is capable of directing expression of the nucleic acid preferentially in a particular cell type (e.g., tissue-specific regulatory elements are used to express the nucleic acid).

[0676] The methods of the invention may further use a recombinant expression vector comprising a DNA molecule of the invention cloned into the expression vector in an antisense orientation. That is, the DNA molecule is operatively linked to a regulatory sequence in a manner which allows for expression (by transcription of the DNA molecule) of an RNA molecule which is antisense to 140, 1470, 1686, 2089, 2427, 3702, 5891, 6428, 7181, 7660, 25641, 69583, 49863, 8897, 1682, 17667, 9235, 3703, 14171, 10359, 1660, 1450, 18894, 2088, 32427, 2160, 9252, 9389, 1642, 85269, 10297, 1584, 9525, 14124, 4469, 8990, 2100, 9288, 64698, 10480, 20893, 33230, 1586, 9943, 16334, 68862, 9011, 14031, 6178, 21225, 1420, 32236, 2099, 2150, 26583, 2784, 8941, 9811, 27444, 50566 or 66428 mRNA. Regulatory sequences operatively linked to a nucleic acid cloned in the antisense orientation can be chosen which direct the continuous expression of the antisense RNA molecule in a variety of cell types, for instance viral promoters and/or enhancers, or regulatory sequences can be chosen which direct constitutive, tissue specific, or cell type specific expression of antisense RNA. The antisense expression vector can be in the form of a recombinant plasmid, phagemid, or attenuated virus in which antisense nucleic acids are produced under the control of a high efficiency regulatory region, the activity of which can be determined by the cell type into which the vector is introduced. For a discussion of the regulation of gene expression using antisense genes, see Weintraub, H. et al., Antisense RNA as a molecular tool for genetic analysis, Reviews—Trends in Genetics, Vol. 1(1) 1986.

[0677] Another aspect of the invention pertains to the use of host cells into which a 140, 1470, 1686, 2089, 2427, 3702, 5891, 6428, 7181, 7660, 25641, 69583, 49863, 8897, 1682, 17667, 9235, 3703, 14171, 10359, 1660, 1450, 18894, 2088, 32427, 2160, 9252, 9389, 1642, 85269, 10297, 1584, 9525, 14124, 4469, 8990, 2100, 9288, 64698, 10480, 20893, 33230, 1586, 9943, 16334, 68862, 9011, 14031, 6178, 21225, 1420, 32236, 2099, 2150, 26583, 2784, 8941, 9811, 27444, 50566 or 66428 nucleic acid molecule of the invention is introduced, e.g., a 140, 1470, 1686, 2089, 2427, 3702, 5891, 6428, 7181, 7660, 25641, 69583, 49863, 8897, 1682, 17667, 9235, 3703, 14171, 10359, 1660, 1450, 18894, 2088, 32427, 2160, 9252, 9389, 1642, 85269, 10297, 1584, 9525, 14124, 4469, 8990, 2100, 9288, 64698, 10480, 20893, 33230, 1586, 9943, 16334, 68862, 9011, 14031, 6178, 21225, 1420, 32236, 2099, 2150, 26583, 2784, 8941, 9811, 27444, 50566 or 66428 nucleic acid molecule within a recombinant expression vector or a 140, 1470, 1686, 2089, 2427, 3702, 5891, 6428, 7181, 7660, 25641, 69583, 49863, 8897, 1682, 17667, 9235, 3703, 14171, 10359, 1660, 1450, 18894, 2088, 32427, 2160, 9252, 9389, 1642, 85269, 10297, 1584, 9525, 14124, 4469, 8990, 2100, 9288, 64698, 10480, 20893, 33230, 1586, 9943, 16334, 68862, 9011, 14031, 6178, 21225, 1420, 32236, 2099, 2150, 26583, 2784, 8941, 9811, 27444, 50566 or 66428 nucleic acid molecule containing sequences which allow it to homologously recombine into a specific site of the host cell's genome. The terms “host cell” and “recombinant host cell” are used interchangeably herein. It is understood that such terms refer not only to the particular subject cell but to the progeny or potential progeny of such a cell. Because certain modifications may occur in succeeding generations due to either mutation or environmental influences, such progeny may not, in fact, be identical to the parent cell, but are still included within the scope of the term as used herein.

[0678] A host cell can be any prokaryotic or eukaryotic cell. For example, a 140, 1470, 1686, 2089, 2427, 3702, 5891, 6428, 7181, 7660, 25641, 69583, 49863, 8897, 1682, 17667, 9235, 3703, 14171, 10359, 1660, 1450, 18894, 2088, 32427, 2160, 9252, 9389, 1642, 85269, 10297, 1584, 9525, 14124, 4469, 8990, 2100, 9288, 64698, 10480, 20893, 33230, 1586, 9943, 16334, 68862, 9011, 14031, 6178, 21225, 1420, 32236, 2099, 2150, 26583, 2784, 8941, 9811, 27444, 50566 or 66428 protein can be expressed in bacterial cells such as E. coli, insect cells, yeast or mammalian cells (such as Chinese hamster ovary cells (CHO) or COS cells). Other suitable host cells are known to those skilled in the art.

[0679] Vector DNA can be introduced into prokaryotic or eukaryotic cells via conventional transformation or transfection techniques. As used herein, the terms “transformation” and “transfection” are intended to refer to a variety of art-recognized techniques for introducing foreign nucleic acid (e.g., DNA) into a host cell, including calcium phosphate or calcium chloride co-precipitation, DEAE-dextran-mediated transfection, lipofection, or electroporation. Suitable methods for transforming or transfecting host cells can be found in Sambrook et al. (Molecular Cloning: A Laboratory Manual. 2^{nd}, ed., Cold Spring Harbor Laboratory, Cold Spring Harbor Laboratory Press, Cold Spring Harbor, N.Y., 1989), and other laboratory manuals.

[0680] A host cell used in the methods of the invention, such as a prokaryotic or eukaryotic host cell in culture, can be used to produce (i.e., express) a 140, 1470, 1686, 2089, 2427, 3702, 5891, 6428, 7181, 7660, 25641, 69583, 49863, 8897, 1682, 17667, 9235, 3703, 14171, 10359, 1660, 1450, 18894, 2088, 32427, 2160, 9252, 9389, 1642, 85269, 10297, 1584, 9525, 14124, 4469, 8990, 2100, 9288, 64698, 10480, 20893, 33230, 1586, 9943, 16334, 68862, 9011, 14031, 6178, 21225, 1420, 32236, 2099, 2150, 26583, 2784, 8941, 9811, 27444, 50566 or 66428 protein. Accordingly, the invention further provides methods for producing a 140, 1470, 1686, 2089, 2427, 3702, 5891, 6428, 7181, 7660, 25641, 69583, 49863, 8897, 1682, 17667, 9235, 3703, 14171, 10359, 1660, 1450, 18894, 2088, 32427, 2160, 9252, 9389, 1642, 85269, 10297, 1584, 9525, 14124, 4469, 8990, 2100, 9288, 64698, 10480, 20893, 33230, 1586, 9943, 16334, 68862, 9011, 14031, 6178, 21225, 1420, 32236, 2099, 2150, 26583, 2784, 8941, 9811, 27444, 50566 or 66428 protein using the host cells of the invention. In one embodiment, the method comprises culturing the host cell of the invention (into which a recombinant expression vector encoding a 140, 1470, 1686, 2089, 2427, 3702, 5891, 6428, 7181, 7660, 25641, 69583, 49863, 8897, 1682, 17667, 9235, 3703, 14171, 10359, 1660, 1450, 18894, 2088, 32427, 2160, 9252, 9389, 1642, 85269, 10297, 1584, 9525, 14124, 4469, 8990, 2100, 9288, 64698, 10480, 20893, 33230, 1586, 9943, 16334, 68862, 9011, 14031, 6178, 21225, 1420, 32236, 2099, 2150, 26583, 2784, 8941, 9811, 27444, 50566 or 66428 protein has been introduced) in a suitable medium such that a 140, 1470, 1686, 2089, 2427, 3702, 5891, 6428, 7181, 7660, 25641, 69583, 49863, 8897, 1682, 17667, 9235, 3703, 14171, 10359, 1660, 1450, 18894, 2088, 32427, 2160, 9252, 9389, 1642, 85269, 10297, 1584, 9525, 14124, 4469, 8990, 2100, 9288, 64698, 10480, 20893, 33230, 1586, 9943, 16334, 68862, 9011, 14031, 6178, 21225, 1420, 32236, 2099, 2150, 26583, 2784, 8941, 9811, 27444, 50566 or 66428 protein is produced. In another embodiment, the method further comprises isolating a 140, 1470, 1686, 2089, 2427, 3702, 5891, 6428, 7181, 7660, 25641, 69583, 49863, 8897, 1682, 17667, 9235, 3703, 14171, 10359, 1660, 1450, 18894, 2088, 32427, 2160, 9252, 9389, 1642, 85269, 10297, 1584, 9525, 14124, 4469, 8990, 2100, 9288, 64698, 10480, 20893, 33230, 1586, 9943, 16334, 68862, 9011, 14031, 6178, 21225, 1420, 32236, 2099, 2150, 26583, 2784, 8941, 9811, 27444, 50566 or 66428 protein from the medium or the host cell.

[0681] Isolated Nucleic Acid Molecules Used in the Methods of the Invention

[0682] The methods of the invention include the use of isolated nucleic acid molecules that encode 140, 1470, 1686, 2089, 2427, 3702, 5891, 6428, 7181, 7660, 25641, 69583, 49863, 8897, 1682, 17667, 9235, 3703, 14171, 10359, 1660, 1450, 18894, 2088, 32427, 2160, 9252, 9389, 1642, 85269, 10297, 1584, 9525, 14124, 4469, 8990, 2100, 9288, 64698, 10480, 20893, 33230, 1586, 9943, 16334, 68862, 9011, 14031, 6178, 21225, 1420, 32236, 2099, 2150, 26583, 2784, 8941, 9811, 27444, 50566 or 66428 proteins or biologically active portions thereof, as well as nucleic acid fragments sufficient for use as hybridization probes to identify 140, 1470, 1686, 2089, 2427, 3702, 5891, 6428, 7181, 7660, 25641, 69583, 49863, 8897, 1682, 17667, 9235, 3703, 14171, 10359, 1660, 1450, 18894, 2088, 32427, 2160, 9252, 9389, 1642, 85269, 10297, 1584, 9525, 14124, 4469, 8990, 2100, 9288, 64698, 10480, 20893, 33230, 1586, 9943, 16334, 68862, 9011, 14031, 6178, 21225, 1420, 32236, 2099, 2150, 26583, 2784, 8941, 9811, 27444, 50566 or 66428-encoding nucleic acid molecules (e.g., 140, 1470, 1686, 2089, 2427, 3702, 5891, 6428, 7181, 7660, 25641, 69583, 49863, 8897, 1682, 17667, 9235, 3703, 14171, 10359, 1660, 1450, 18894, 2088, 32427, 2160, 9252, 9389, 1642, 85269, 10297, 1584, 9525, 14124, 4469, 8990, 2100, 9288, 64698, 10480, 20893, 33230, 1586, 9943, 16334, 68862, 9011, 14031, 6178, 21225, 1420, 32236, 2099, 2150, 26583, 2784, 8941, 9811, 27444, 50566 or 66428 mRNA) and fragments for use as PCR primers for the amplification or mutation of 140, 1470, 1686, 2089, 2427, 3702, 5891, 6428, 7181, 7660, 25641, 69583, 49863, 8897, 1682, 17667, 9235, 3703, 14171, 10359, 1660, 1450, 18894, 2088, 32427, 2160, 9252, 9389, 1642, 85269, 10297, 1584, 9525, 14124, 4469, 8990, 2100, 9288, 64698, 10480, 20893, 33230, 1586, 9943, 16334, 68862, 9011, 14031, 6178, 21225, 1420, 32236, 2099, 2150, 26583, 2784, 8941, 9811, 27444, 50566 or 66428 nucleic acid molecules. As used herein, the term “nucleic acid molecule” is intended to include DNA molecules (e.g., cDNA or genomic DNA) and RNA molecules (e.g., mRNA) and analogs of the DNA or RNA generated using nucleotide analogs. The nucleic acid molecule can be single-stranded or double-stranded, but preferably is double-stranded DNA.

[0683] A nucleic acid molecule used in the methods of the present invention, e.g., a nucleic acid molecule having the nucleotide sequence of SEQ ID NO:1, 3, 5, 7, 9, 11, 13, 15, 17, 19, 21, 23, 25, 27, 29, 31, 33, 35, 37, 39, 41, 43, 45, 47, 49, 51, 53, 55, 57, 59, 61, 63, 65, 67, 69, 71, 73, 75, 77, 79, 81, 83, 85, 87, 89, 91, 93, 95, 97, 99, 101, 103, 105, 107, 109, 111, 113, 115, 117, 119 or 121, or a portion thereof, can be isolated using standard molecular biology techniques and the sequence information provided herein. Using all or portion of the nucleic acid sequence of SEQ ID NO:1, 3, 5, 7, 9, 11, 13, 15, 17, 19, 21, 23, 25, 27, 29, 31, 33, 35, 37, 39, 41, 43, 45, 47, 49, 51, 53, 55, 57, 59, 61, 63, 65, 67, 69, 71, 73, 75, 77, 79, 81, 83, 85, 87, 89, 91, 93, 95, 97, 99, 101, 103, 105, 107, 109, 111, 113, 115, 117, 119 or 121, as a hybridization probe, 140, 1470, 1686, 2089, 2427, 3702, 5891, 6428, 7181, 7660, 25641, 69583, 49863, 8897, 1682, 17667, 9235, 3703, 14171, 10359, 1660, 1450, 18894, 2088, 32427, 2160, 9252, 9389, 1642, 85269, 10297, 1584, 9525, 14124, 4469, 8990, 2100, 9288, 64698, 10480, 20893, 33230, 1586, 9943, 16334, 68862, 9011, 14031, 6178, 21225, 1420, 32236, 2099, 2150, 26583, 2784, 8941, 9811, 27444, 50566 or 66428 nucleic acid molecules can be isolated using standard hybridization and cloning techniques (e.g., as described in Sambrook, J., Fritsh, E. F., and Maniatis, T. Molecular Cloning: A Laboratory Manual. 2^{nd}, ed., Cold Spring Harbor Laboratory, Cold Spring Harbor Laboratory Press, Cold Spring Harbor, N.Y., 1989).

[0684] Moreover, a nucleic acid molecule encompassing all or a portion of SEQ ID NO:1, 3, 5, 7, 9, 11, 13, 15, 17, 19, 21, 23, 25, 27, 29, 31, 33, 35, 37, 39, 41, 43, 45, 47, 49, 51, 53, 55, 57, 59, 61, 63, 65, 67, 69, 71, 73, 75, 77, 79, 81, 83, 85, 87, 89, 91, 93, 95, 97, 99, 101, 103, 105, 107, 109, 111, 113, 115, 117, 119 or 121 can be isolated by the polymerase chain reaction (PCR) using synthetic oligonucleotide primers designed based upon the sequence of SEQ ID NO:1, 3, 5, 7, 9, 11, 13, 15, 17, 19, 21, 23, 25, 27, 29, 31, 33, 35, 37, 39, 41, 43, 45, 47, 49, 51, 53, 55, 57, 59, 61, 63, 65, 67, 69, 71, 73, 75, 77, 79, 81, 83, 85, 87, 89, 91, 93, 95, 97, 99, 101, 103, 105, 107, 109, 111, 113, 115, 117, 119 or 121.

[0685] A nucleic acid used in the methods of the invention can be amplified using cDNA, mRNA or, alternatively, genomic DNA as a template and appropriate oligonucleotide primers according to standard PCR amplification techniques. Furthermore, oligonucleotides corresponding to 140, 1470, 1686, 2089, 2427, 3702, 5891, 6428, 7181, 7660, 25641, 69583, 49863, 8897, 1682, 17667, 9235, 3703, 14171, 10359, 1660, 1450, 18894, 2088, 32427, 2160, 9252, 9389, 1642, 85269, 10297, 1584, 9525, 14124, 4469, 8990, 2100, 9288, 64698, 10480, 20893, 33230, 1586, 9943, 16334, 68862, 9011, 14031, 6178, 21225, 1420, 32236, 2099, 2150, 26583, 2784, 8941, 9811, 27444, 50566 or 66428 nucleotide sequences can be prepared by standard synthetic techniques, e.g., using an automated DNA synthesizer.

[0686] In a preferred embodiment, the isolated nucleic acid molecules used in the methods of the invention comprise the nucleotide sequence shown in SEQ ID NO:1, 3, 5, 7, 9, 11, 13, 15, 17, 19, 21, 23, 25, 27, 29, 31, 33, 35, 37, 39, 41, 43, 45, 47, 49, 51, 53, 55, 57, 59, 61, 63, 65, 67, 69, 71, 73, 75, 77, 79, 81, 83, 85, 87, 89, 91, 93, 95, 97, 99, 101, 103, 105, 107, 109, 111, 113, 115, 117, 119 or 121, a complement of the nucleotide sequence shown in SEQ ID NO:1, 3, 5, 7, 9, 11, 13, 15, 17, 19, 21, 23, 25, 27, 29, 31, 33, 35, 37, 39, 41, 43, 45, 47, 49, 51, 53, 55, 57, 59, 61, 63, 65, 67, 69, 71, 73, 75, 77, 79, 81, 83, 85, 87, 89, 91, 93, 95, 97, 99, 101, 103, 105, 107, 109, 111, 113, 115, 117, 119 or 121, or a portion of any of these nucleotide sequences. A nucleic acid molecule which is complementary to the nucleotide sequence shown in SEQ ID NO:1, 3, 5, 7, 9, 11, 13, 15, 17, 19, 21, 23, 25, 27, 29, 31, 33, 35, 37, 39, 41, 43, 45, 47, 49, 51, 53, 55, 57, 59, 61, 63, 65, 67, 69, 71, 73, 75, 77, 79, 81, 83, 85, 87, 89, 91, 93, 95, 97, 99, 101, 103, 105, 107, 109, 111, 113, 115, 117, 119 or 121, is one which is sufficiently complementary to the nucleotide sequence shown in SEQ ID NO:1, 3, 5, 7, 9, 11, 13, 15, 17, 19, 21, 23, 25, 27, 29, 31, 33, 35, 37, 39, 41, 43, 45, 47, 49, 51, 53, 55, 57, 59, 61, 63, 65, 67, 69, 71, 73, 75, 77, 79, 81, 83, 85, 87, 89, 91, 93, 95, 97, 99, 101, 103, 105, 107, 109, 111, 113, 115, 117, 119 or 121, such that it can hybridize to the nucleotide sequence shown in SEQ ID NO:1, 3, 5, 7, 9, 11, 13, 15, 17, 19, 21, 23, 25, 27, 29, 31, 33, 35, 37, 39, 41, 43, 45, 47, 49, 51, 53, 55, 57, 59, 61, 63, 65, 67, 69, 71, 73, 75, 77, 79, 81, 83, 85, 87, 89, 91, 93, 95, 97, 99, 101, 103, 105, 107, 109, 111, 113, 115, 117, 119 or 121, thereby forming a stable duplex.

[0687] In still another preferred embodiment, an isolated nucleic acid molecule used in the methods of the present invention comprises a nucleotide sequence which is at least about 55%, 60%, 65%, 70%, 75%, 80%, 85%, 90%, 95%, 96%, 97%, 98%, 99% or more identical to the entire length of the nucleotide sequence shown in SEQ ID NO:1, 3, 5, 7, 9, 11, 13, 15, 17, 19, 21, 23, 25, 27, 29, 31, 33, 35, 37, 39, 41, 43, 45, 47, 49, 51, 53, 55, 57, 59, 61, 63, 65, 67, 69, 71, 73, 75, 77, 79, 81, 83, 85, 87, 89, 91, 93, 95, 97, 99, 101, 103, 105, 107, 109, 111, 113, 115, 117, 119 or 121, or a portion of any of this nucleotide sequence.

[0688] Moreover, the nucleic acid molecules used in the methods of the invention can comprise only a portion of the nucleic acid sequence of SEQ ID NO:1, 3, 5, 7, 9, 11, 13, 15, 17, 19, 21, 23, 25, 27, 29, 31, 33, 35, 37, 39, 41, 43, 45, 47, 49, 51, 53, 55, 57, 59, 61, 63, 65, 67, 69, 71, 73, 75, 77, 79, 81, 83, 85, 87, 89, 91, 93, 95, 97, 99, 101, 103, 105, 107, 109, 111, 113, 115, 117, 119 or 121, for example, a fragment which can be used as a probe or primer or a fragment encoding a portion of a 140, 1470, 1686, 2089, 2427, 3702, 5891, 6428, 7181, 7660, 25641, 69583, 49863, 8897, 1682, 17667, 9235, 3703, 14171, 10359, 1660, 1450, 18894, 2088, 32427, 2160, 9252, 9389, 1642, 85269, 10297, 1584, 9525, 14124, 4469, 8990, 2100, 9288, 64698, 10480, 20893, 33230, 1586, 9943, 16334, 68862, 9011, 14031, 6178, 21225, 1420, 32236, 2099, 2150, 26583, 2784, 8941, 9811, 27444, 50566 or 66428 protein, e.g., a biologically active portion of a 140, 1470, 1686, 2089, 2427, 3702, 5891, 6428, 7181, 7660, 25641, 69583, 49863, 8897, 1682, 17667, 9235, 3703, 14171, 10359, 1660, 1450, 18894, 2088, 32427, 2160, 9252, 9389, 1642, 85269, 10297, 1584, 9525, 14124, 4469, 8990, 2100, 9288, 64698, 10480, 20893, 33230, 1586, 9943, 16334, 68862, 9011, 14031, 6178, 21225, 1420, 32236, 2099, 2150, 26583, 2784, 8941, 9811, 27444, 50566 or 66428 protein. The probe/primer typically comprises substantially purified oligonucleotide. The oligonucleotide typically comprises a region of nucleotide sequence that hybridizes under stringent conditions to at least about 12 or 15, preferably about 20 or 25, more preferably about 30, 35, 40, 45, 50, 55, 60, 65, or 75 consecutive nucleotides of a sense sequence of SEQ ID NO:1, 3, 5, 7, 9, 11, 13, 15, 17, 19, 21, 23, 25, 27, 29, 31, 33, 35, 37, 39, 41, 43, 45, 47, 49, 51, 53, 55, 57, 59, 61, 63, 65, 67, 69, 71, 73, 75, 77, 79, 81, 83, 85, 87, 89, 91, 93, 95, 97, 99, 101, 103, 105, 107, 109, 111, 113, 115, 117, 119 or 121, of an anti-sense sequence of SEQ ID NO:1, 3, 5, 7, 9, 11, 13, 15, 17, 19, 21, 23, 25, 27, 29, 31, 33, 35, 37, 39, 41, 43, 45, 47, 49, 51, 53, 55, 57, 59, 61, 63, 65, 67, 69, 71, 73, 75, 77, 79, 81, 83, 85, 87, 89, 91, 93, 95, 97, 99, 101, 103, 105, 107, 109, 111, 113, 115, 117, 119 or 121, or of a naturally occurring allelic variant or mutant of SEQ ID NO:1, 3, 5, 7, 9, 11, 13, 15, 17, 19, 21, 23, 25, 27, 29, 31, 33, 35, 37, 39, 41, 43, 45, 47, 49, 51, 53, 55, 57, 59, 61, 63, 65, 67, 69, 71, 73, 75, 77, 79, 81, 83, 85, 87, 89, 91, 93, 95, 97, 99, 101, 103, 105, 107, 109, 111, 113, 115, 117, 119 or 121. In one embodiment, a nucleic acid molecule used in the methods of the present invention comprises a nucleotide sequence which is greater than 100, 100-200, 200-300, 300-400, 400-500, 500-600, 600-700, 700-800, 800-900, 900-1000, 1000-1100, 1100-1200, 1200-1300, or more nucleotides in length and hybridizes under stringent hybridization conditions to a nucleic acid molecule of SEQ ID NO:1, 3, 5, 7, 9, 11, 13, 15, 17, 19, 21, 23, 25, 27, 29, 31, 33, 35, 37, 39, 41, 43, 45, 47, 49, 51, 53, 55, 57, 59, 61, 63, 65, 67, 69, 71, 73, 75, 77, 79, 81, 83, 85, 87, 89, 91, 93, 95, 97, 99, 101, 103, 105, 107, 109, 111, 113, 115, 117, 119 or 121.

[0689] As used herein, the term “hybridizes under stringent conditions” is intended to describe conditions for hybridization and washing under which nucleotide sequences that are significantly identical or homologous to each other remain hybridized to each other. Preferably, the conditions are such that sequences at least about 70%, more preferably at least about 80%, even more preferably at least about 85% or 90% identical to each other remain hybridized to each other. Such stringent conditions are known to those skilled in the art and can be found in Current Protocols in Molecular Biology, Ausubel et al., eds., John Wiley & Sons, Inc. (1995), sections 2, 4 and 6. Additional stringent conditions can be found in Molecular Cloning: A Laboratory Manual, Sambrook et al., Cold Spring Harbor Press, Cold Spring Harbor, N.Y. (1989), chapters 7, 9 and 11. A preferred, non-limiting example of stringent hybridization conditions includes hybridization in 4X sodium chloride/sodium citrate (SSC), at about 65-70° C. (or hybridization in 4×SSC plus 50% formamide at about 42-50° C.) followed by one or more washes in 1×SSC, at about 65-70° C. A preferred, non-limiting example of highly stringent hybridization conditions includes hybridization in 1×SSC, at about 65-70° C. (or hybridization in 1×SSC plus 50% formamide at about 42-50° C.) followed by one or more washes in 0.3×SSC, at about 65-70° C. A preferred, non-limiting example of reduced stringency hybridization conditions includes hybridization in 4×SSC, at about 50-60° C. (or alternatively hybridization in 6×SSC plus 50% formamide at about 40-45° C.) followed by one or more washes in 2×SSC, at about 50-60° C. Ranges intermediate to the above-recited values, e.g., at 65-70° C. or at 42-50° C. are also intended to be encompassed by the present invention. SSPE (1×SSPE is 0.15M NaCl, 10 mM NaH₂PO₄, and 1.25 mM EDTA, pH 7.4) can be substituted for SSC (1×SSC is 0.15M NaCl and 15 mM sodium citrate) in the hybridization and wash buffers; washes are performed for 15 minutes each after hybridization is complete. The hybridization temperature for hybrids anticipated to be less than 50 base pairs in length should be 5-10C less than the melting temperature (Tₘ) of the hybrid, where Tₘ is determined according to the following equations. For hybrids less than 18 base pairs in length, Tₘ(° C.)=2(# of A+T bases)+4(# of G+C bases). For hybrids between 18 and 49 base pairs in length, Tₘ(° C.)=81.5+16.6(log₁₀[Na⁺])+0.41(% G+C)−(600/N), where N is the number of bases in the hybrid, and [Na⁺] is the concentration of sodium ions in the hybridization buffer ([Na⁺] for 1×SSC=0.165 M). It will also be recognized by the skilled practitioner that additional reagents may be added to hybridization and/or wash buffers to decrease non-specific hybridization of nucleic acid molecules to membranes, for example, nitrocellulose or nylon membranes, including but not limited to blocking agents (e.g., BSA or salmon or herring sperm carrier DNA), detergents (e.g., SDS), chelating agents (e.g., EDTA), Ficoll, PVP and the like. When using nylon membranes, in particular, an additional preferred, non-limiting example of stringent hybridization conditions is hybridization in 0.25-0.5M NaH₂PO₄, 7% SDS at about 65° C., followed by one or more washes at 0.02M NaH₂PO₄, 1% SDS at 65° C., see e.g., Church and Gilbert (1984) Proc. Natl. Acad. Sci. USA 81:1991-1995, (or alternatively 0.2×SSC, 1% SDS).

[0690] In preferred embodiments, the probe further comprises a label group attached thereto, e.g., the label group can be a radioisotope, a fluorescent compound, an enzyme, or an enzyme co-factor. Such probes can be used as a part of a diagnostic test kit for identifying cells or tissue which misexpress a 140, 1470, 1686, 2089, 2427, 3702, 5891, 6428, 7181, 7660, 25641, 69583, 49863, 8897, 1682, 17667, 9235, 3703, 14171, 10359, 1660, 1450, 18894, 2088, 32427, 2160, 9252, 9389, 1642, 85269, 10297, 1584, 9525, 14124, 4469, 8990, 2100, 9288, 64698, 10480, 20893, 33230, 1586, 9943, 16334, 68862, 9011, 14031, 6178, 21225, 1420, 32236, 2099, 2150, 26583, 2784, 8941, 9811, 27444, 50566 or 66428 protein, such as by measuring a level of a 140, 1470, 1686, 2089, 2427, 3702, 5891, 6428, 7181, 7660, 25641, 69583, 49863, 8897, 1682, 17667, 9235, 3703, 14171, 10359, 1660, 1450, 18894, 2088, 32427, 2160, 9252, 9389, 1642, 85269, 10297, 1584, 9525, 14124, 4469, 8990, 2100, 9288, 64698, 10480, 20893, 33230, 1586, 9943, 16334, 68862, 9011, 14031, 6178, 21225, 1420, 32236, 2099, 2150, 26583, 2784, 8941, 9811, 27444, 50566 or 66428-encoding nucleic acid in a sample of cells from a subject e.g., detecting 140, 1470, 1686, 2089, 2427, 3702, 5891, 6428, 7181, 7660, 25641, 69583, 49863, 8897, 1682, 17667, 9235, 3703, 14171, 10359, 1660, 1450, 18894, 2088, 32427, 2160, 9252, 9389, 1642, 85269, 10297, 1584, 9525, 14124, 4469, 8990, 2100, 9288, 64698, 10480, 20893, 33230, 1586, 9943, 16334, 68862, 9011, 14031, 6178, 21225, 1420, 32236, 2099, 2150, 26583, 2784, 8941, 9811, 27444, 50566 or 66428 mRNA levels or determining whether a genomic 140, 1470, 1686, 2089, 2427, 3702, 5891, 6428, 7181, 7660, 25641, 69583, 49863, 8897, 1682, 17667, 9235, 3703, 14171, 10359, 1660, 1450, 18894, 2088, 32427, 2160, 9252, 9389, 1642, 85269, 10297, 1584, 9525, 14124, 4469, 8990, 2100, 9288, 64698, 10480, 20893, 33230, 1586, 9943, 16334, 68862, 9011, 14031, 6178, 21225, 1420, 32236, 2099, 2150, 26583, 2784, 8941, 9811, 27444, 50566 or 66428 gene has been mutated or deleted.

[0691] The methods of the invention further encompass the use of nucleic acid molecules that differ from the nucleotide sequence shown in SEQ ID NO:1, 3, 5, 7, 9, 11, 13, 15, 17, 19, 21, 23, 25, 27, 29, 31, 33, 35, 37, 39, 41, 43, 45, 47, 49, 51, 53, 55, 57, 59, 61, 63, 65, 67, 69, 71, 73, 75, 77, 79, 81, 83, 85, 87, 89, 91, 93, 95, 97, 99, 101, 103, 105, 107, 109, 111, 113, 115, 117, 119 or 121, due to degeneracy of the genetic code and thus encode the same 140, 1470, 1686, 2089, 2427, 3702, 5891, 6428, 7181, 7660, 25641, 69583, 49863, 8897, 1682, 17667, 9235, 3703, 14171, 10359, 1660, 1450, 18894, 2088, 32427, 2160, 9252, 9389, 1642, 85269, 10297, 1584, 9525, 14124, 4469, 8990, 2100, 9288, 64698, 10480, 20893, 33230, 1586, 9943, 16334, 68862, 9011, 14031, 6178, 21225, 1420, 32236, 2099, 2150, 26583, 2784, 8941, 9811, 27444, 50566 or 66428 proteins as those encoded by the nucleotide sequence shown in SEQ ID NO:1, 3, 5, 7, 9, 11, 13, 15, 17, 19, 21, 23, 25, 27, 29, 31, 33, 35, 37, 39, 41, 43, 45, 47, 49, 51, 53, 55, 57, 59, 61, 63, 65, 67, 69, 71, 73, 75, 77, 79, 81, 83, 85, 87, 89, 91, 93, 95, 97, 99, 101, 103, 105, 107, 109, 111, 113, 115, 117, 119 or 121. In another embodiment, an isolated nucleic acid molecule included in the methods of the invention has a nucleotide sequence encoding a protein having an amino acid sequence shown in SEQ ID NO:2, 4, 6, 8, 10, 12, 14, 16, 18, 20, 22, 24, 26, 28, 30, 32, 34, 36, 38, 40, 42, 44, 46, 48, 50, 52, 54, 56, 58, 60, 62, 64, 66, 68, 70, 72, 74, 76, 78, 80, 82, 84, 86, 88, 90, 92, 94, 96, 98, 100, 102, 104, 106, 108, 110, 112, 114, 116, 118, 120 or 122.

[0692] The methods of the invention further include the use of allelic variants of human 140, 1470, 1686, 2089, 2427, 3702, 5891, 6428, 7181, 7660, 25641, 69583, 49863, 8897, 1682, 17667, 9235, 3703, 14171, 10359, 1660, 1450, 18894, 2088, 32427, 2160, 9252, 9389, 1642, 85269, 10297, 1584, 9525, 14124, 4469, 8990, 2100, 9288, 64698, 10480, 20893, 33230, 1586, 9943, 16334, 68862, 9011, 14031, 6178, 21225, 1420, 32236, 2099, 2150, 26583, 2784, 8941, 9811, 27444, 50566 or 66428, e.g., functional and non-functional allelic variants. Functional allelic variants are naturally occurring amino acid sequence variants of the human 140, 1470, 1686, 2089, 2427, 3702, 5891, 6428, 7181, 7660, 25641, 69583, 49863, 8897, 1682, 17667, 9235, 3703, 14171, 10359, 1660, 1450, 18894, 2088, 32427, 2160, 9252, 9389, 1642, 85269, 10297, 1584, 9525, 14124, 4469, 8990, 2100, 9288, 64698, 10480, 20893, 33230, 1586, 9943, 16334, 68862, 9011, 14031, 6178, 21225, 1420, 32236, 2099, 2150, 26583, 2784, 8941, 9811, 27444, 50566 or 66428 protein that maintain a 140, 1470, 1686, 2089, 2427, 3702, 5891, 6428, 7181, 7660, 25641, 69583, 49863, 8897, 1682, 17667, 9235, 3703, 14171, 10359, 1660, 1450, 18894, 2088, 32427, 2160, 9252, 9389, 1642, 85269, 10297, 1584, 9525, 14124, 4469, 8990, 2100, 9288, 64698, 10480, 20893, 33230, 1586, 9943, 16334, 68862, 9011, 14031, 6178, 21225, 1420, 32236, 2099, 2150, 26583, 2784, 8941, 9811, 27444, 50566 or 66428 activity. Functional allelic variants will typically contain only conservative substitution of one or more amino acids of SEQ ID NO:2, 4, 6, 8, 10, 12, 14, 16, 18, 20, 22, 24, 26, 28, 30, 32, 34, 36, 38, 40, 42, 44, 46, 48, 50, 52, 54, 56, 58, 60, 62, 64, 66, 68, 70, 72, 74, 76, 78, 80, 82, 84, 86, 88, 90, 92, 94, 96, 98, 100, 102, 104, 106, 108, 110, 112, 114, 116, 118, 120 or 122, or substitution, deletion or insertion of non-critical residues in non-critical regions of the protein.

[0693] Non-functional allelic variants are naturally occurring amino acid sequence variants of the human 140, 1470, 1686, 2089, 2427, 3702, 5891, 6428, 7181, 7660, 25641, 69583, 49863, 8897, 1682, 17667, 9235, 3703, 14171, 10359, 1660, 1450, 18894, 2088, 32427, 2160, 9252, 9389, 1642, 85269, 10297, 1584, 9525, 14124, 4469, 8990, 2100, 9288, 64698, 10480, 20893, 33230, 1586, 9943, 16334, 68862, 9011, 14031, 6178, 21225, 1420, 32236, 2099, 2150, 26583, 2784, 8941, 9811, 27444, 50566 or 66428 protein that do not have a 140, 1470, 1686, 2089, 2427, 3702, 5891, 6428, 7181, 7660, 25641, 69583, 49863, 8897, 1682, 17667, 9235, 3703, 14171, 10359, 1660, 1450, 18894, 2088, 32427, 2160, 9252, 9389, 1642, 85269, 10297, 1584, 9525, 14124, 4469, 8990, 2100, 9288, 64698, 10480, 20893, 33230, 1586, 9943, 16334, 68862, 9011, 14031, 6178, 21225, 1420, 32236, 2099, 2150, 26583, 2784, 8941, 9811, 27444, 50566 or 66428 activity. Non-functional allelic variants will typically contain a non-conservative substitution, deletion, or insertion or premature truncation of the amino acid sequence of SEQ ID NO:2, 4, 6, 8, 10, 12, 14, 16, 18, 20, 22, 24, 26, 28, 30, 32, 34, 36, 38, 40, 42, 44, 46, 48, 50, 52, 54, 56, 58, 60, 62, 64, 66, 68, 70, 72, 74, 76, 78, 80, 82, 84, 86, 88, 90, 92, 94, 96, 98, 100, 102, 104, 106, 108, 110, 112, 114, 116, 118, 120 or 122 or a substitution, insertion or deletion in critical residues or critical regions of the protein.

[0694] The methods of the present invention may further use non-human orthologues of the human 140, 1470, 1686, 2089, 2427, 3702, 5891, 6428, 7181, 7660, 25641, 69583, 49863, 8897, 1682, 17667, 9235, 3703, 14171, 10359, 1660, 1450, 18894, 2088, 32427, 2160, 9252, 9389, 1642, 85269, 10297, 1584, 9525, 14124, 4469, 8990, 2100, 9288, 64698, 10480, 20893, 33230, 1586, 9943, 16334, 68862, 9011, 14031, 6178, 21225, 1420, 32236, 2099, 2150, 26583, 2784, 8941, 9811, 27444, 50566 or 66428 protein. Orthologues of the human 140, 1470, 1686, 2089, 2427, 3702, 5891, 6428, 7181, 7660, 25641, 69583, 49863, 8897, 1682, 17667, 9235, 3703, 14171, 10359, 1660, 1450, 18894, 2088, 32427, 2160, 9252, 9389, 1642, 85269, 10297, 1584, 9525, 14124, 4469, 8990, 2100, 9288, 64698, 10480, 20893, 33230, 1586, 9943, 16334, 68862, 9011, 14031, 6178, 21225, 1420, 32236, 2099, 2150, 26583, 2784, 8941, 9811, 27444, 50566 or 66428 protein are proteins that are isolated from non-human organisms and possess the same 140, 1470, 1686, 2089, 2427, 3702, 5891, 6428, 7181, 7660, 25641, 69583, 49863, 8897, 1682, 17667, 9235, 3703, 14171, 10359, 1660, 1450, 18894, 2088, 32427, 2160, 9252, 9389, 1642, 85269, 10297, 1584, 9525, 14124, 4469, 8990, 2100, 9288, 64698, 10480, 20893, 33230, 1586, 9943, 16334, 68862, 9011, 14031, 6178, 21225, 1420, 32236, 2099, 2150, 26583, 2784, 8941, 9811, 27444, 50566 or 66428 activity.

[0695] The methods of the present invention further include the use of nucleic acid molecules comprising the nucleotide sequence of SEQ ID NO:1, 3, 5, 7, 9, 11, 13, 15, 17, 19, 21, 23, 25, 27, 29, 31, 33, 35, 37, 39, 41, 43, 45, 47, 49, 51, 53, 55, 57, 59, 61, 63, 65, 67, 69, 71, 73, 75, 77, 79, 81, 83, 85, 87, 89, 91, 93, 95, 97, 99, 101, 103, 105, 107, 109, 111, 113, 115, 117, 119 or 121 or a portion thereof, in which a mutation has been introduced. The mutation may lead to amino acid substitutions at “non-essential” amino acid residues or at “essential” amino acid residues. A “non-essential” amino acid residue is a residue that can be altered from the wild-type sequence of 140, 1470, 1686, 2089, 2427, 3702, 5891, 6428, 7181, 7660, 25641, 69583, 49863, 8897, 1682, 17667, 9235, 3703, 14171, 10359, 1660, 1450, 18894, 2088, 32427, 2160, 9252, 9389, 1642, 85269, 10297, 1584, 9525, 14124, 4469, 8990, 2100, 9288, 64698, 10480, 20893, 33230, 1586, 9943, 16334, 68862, 9011, 14031, 6178, 21225, 1420, 32236, 2099, 2150, 26583, 2784, 8941, 9811, 27444, 50566 or 66428 (e.g., the sequence of SEQ ID NO:2, 4, 6, 8, 10, 12, 14, 16, 18, 20, 22, 24, 26, 28, 30, 32, 34, 36, 38, 40, 42, 44, 46, 48, 50, 52, 54, 56, 58, 60, 62, 64, 66, 68, 70, 72, 74, 76, 78, 80, 82, 84, 86, 88, 90, 92, 94, 96, 98, 100, 102, 104, 106, 108, 110, 112, 114, 116, 118, 120 or 122) without altering the biological activity, whereas an “essential” amino acid residue is required for biological activity. For example, amino acid residues that are conserved among the 140, 1470, 1686, 2089, 2427, 3702, 5891, 6428, 7181, 7660, 25641, 69583, 49863, 8897, 1682, 17667, 9235, 3703, 14171, 10359, 1660, 1450, 18894, 2088, 32427, 2160, 9252, 9389, 1642, 85269, 10297, 1584, 9525, 14124, 4469, 8990, 2100, 9288, 64698, 10480, 20893, 33230, 1586, 9943, 16334, 68862, 9011, 14031, 6178, 21225, 1420, 32236, 2099, 2150, 26583, 2784, 8941, 9811, 27444, 50566 or 66428 proteins of the present invention are not likely to be amenable to alteration.

[0696] Mutations can be introduced into SEQ ID NO:1, 3, 5, 7, 9, 11, 13, 15, 17, 19, 21, 23, 25, 27, 29, 31, 33, 35, 37, 39, 41, 43, 45, 47, 49, 51, 53, 55, 57, 59, 61, 63, 65, 67, 69, 71, 73, 75, 77, 79, 81, 83, 85, 87, 89, 91, 93, 95, 97, 99, 101, 103, 105, 107, 109, 111, 113, 115, 117, 119 or 121, by standard techniques, such as site-directed mutagenesis and PCR-mediated mutagenesis. Preferably, conservative amino acid substitutions are made at one or more predicted non-essential amino acid residues. A “conservative amino acid substitution” is one in which the amino acid residue is replaced with an amino acid residue having a similar side chain. Families of amino acid residues having similar side chains have been defined in the art. These families include amino acids with basic side chains (e.g., lysine, arginine, histidine), acidic side chains (e.g., aspartic acid, glutamic acid), uncharged polar side chains (e.g., asparagine, glutamine, serine, threonine, tyrosine, cysteine), nonpolar side chains (e.g., glycine, alanine, valine, leucine, isoleucine, proline, phenylalanine, methionine, tryptophan), beta-branched side chains (e.g., threonine, valine, isoleucine) and aromatic side chains (e.g., tyrosine, phenylalanine, tryptophan, histidine). Thus, a predicted nonessential amino acid residue in a 140, 1470, 1686, 2089, 2427, 3702, 5891, 6428, 7181, 7660, 25641, 69583, 49863, 8897, 1682, 17667, 9235, 3703, 14171, 10359, 1660, 1450, 18894, 2088, 32427, 2160, 9252, 9389, 1642, 85269, 10297, 1584, 9525, 14124, 4469, 8990, 2100, 9288, 64698, 10480, 20893, 33230, 1586, 9943, 16334, 68862, 9011, 14031, 6178, 21225, 1420, 32236, 2099, 2150, 26583, 2784, 8941, 9811, 27444, 50566 or 66428 protein is preferably replaced with another amino acid residue from the same side chain family. Alternatively, in another embodiment, mutations can be introduced randomly along all or part of a 140, 1470, 1686, 2089, 2427, 3702, 5891, 6428, 7181, 7660, 25641, 69583, 49863, 8897, 1682, 17667, 9235, 3703, 14171, 10359, 1660, 1450, 18894, 2088, 32427, 2160, 9252, 9389, 1642, 85269, 10297, 1584, 9525, 14124, 4469, 8990, 2100, 9288, 64698, 10480, 20893, 33230, 1586, 9943, 16334, 68862, 9011, 14031, 6178, 21225, 1420, 32236, 2099, 2150, 26583, 2784, 8941, 9811, 27444, 50566 or 66428 coding sequence, such as by saturation mutagenesis, and the resultant mutants can be screened for 140, 1470, 1686, 2089, 2427, 3702, 5891, 6428, 7181, 7660, 25641, 69583, 49863, 8897, 1682, 17667, 9235, 3703, 14171, 10359, 1660, 1450, 18894, 2088, 32427, 2160, 9252, 9389, 1642, 85269, 10297, 1584, 9525, 14124, 4469, 8990, 2100, 9288, 64698, 10480, 20893, 33230, 1586, 9943, 16334, 68862, 9011, 14031, 6178, 21225, 1420, 32236, 2099, 2150, 26583, 2784, 8941, 9811, 27444, 50566 or 66428 biological activity to identify mutants that retain activity. Following mutagenesis of SEQ ID NO:1, 3, 5, 7, 9, 11, 13, 15, 17, 19, 21, 23, 25, 27, 29, 31, 33, 35, 37, 39, 41, 43, 45, 47, 49, 51, 53, 55, 57, 59, 61, 63, 65, 67, 69, 71, 73, 75, 77, 79, 81, 83, 85, 87, 89, 91, 93, 95, 97, 99, 101, 103, 105, 107, 109, 111, 113, 115, 117, 119 or 121, the encoded protein can be expressed recombinantly and the activity of the protein can be determined using the assay described herein.

[0697] Another aspect of the invention pertains to the use of isolated nucleic acid molecules which are antisense to the nucleotide sequence of SEQ ID NO:1, 3, 5, 7, 9, 11, 13, 15, 17, 19, 21, 23, 25, 27, 29, 31, 33, 35, 37, 39, 41, 43, 45, 47, 49, 51, 53, 55, 57, 59, 61, 63, 65, 67, 69, 71, 73, 75, 77, 79, 81, 83, 85, 87, 89, 91, 93, 95, 97, 99, 101, 103, 105, 107, 109, 111, 113, 115, 117, 119 or 121. An “antisense” nucleic acid comprises a nucleotide sequence which is complementary to a “sense” nucleic acid encoding a protein, e.g., complementary to the coding strand of a double-stranded cDNA molecule or complementary to an mRNA sequence. Accordingly, an antisense nucleic acid can hydrogen bond to a sense nucleic acid. The antisense nucleic acid can be complementary to an entire 140, 1470, 1686, 2089, 2427, 3702, 5891, 6428, 7181, 7660, 25641, 69583, 49863, 8897, 1682, 17667, 9235, 3703, 14171, 10359, 1660, 1450, 18894, 2088, 32427, 2160, 9252, 9389, 1642, 85269, 10297, 1584, 9525, 14124, 4469, 8990, 2100, 9288, 64698, 10480, 20893, 33230, 1586, 9943, 16334, 68862, 9011, 14031, 6178, 21225, 1420, 32236, 2099, 2150, 26583, 2784, 8941, 9811, 27444, 50566 or 66428 coding strand, or to only a portion thereof. In one embodiment, an antisense nucleic acid molecule is antisense to a “coding region” of the coding strand of a nucleotide sequence encoding a 140, 1470, 1686, 2089, 2427, 3702, 5891, 6428, 7181, 7660, 25641, 69583, 49863, 8897, 1682, 17667, 9235, 3703, 14171, 10359, 1660, 1450, 18894, 2088, 32427, 2160, 9252, 9389, 1642, 85269, 10297, 1584, 9525, 14124, 4469, 8990, 2100, 9288, 64698, 10480, 20893, 33230, 1586, 9943, 16334, 68862, 9011, 14031, 6178, 21225, 1420, 32236, 2099, 2150, 26583, 2784, 8941, 9811, 27444, 50566 or 66428. The term “coding region” refers to the region of the nucleotide sequence comprising codons which are translated into amino acid residues. In another embodiment, the antisense nucleic acid molecule is antisense to a “noncoding region” of the coding strand of a nucleotide sequence encoding 140, 1470, 1686, 2089, 2427, 3702, 5891, 6428, 7181, 7660, 25641, 69583, 49863, 8897, 1682, 17667, 9235, 3703, 14171, 10359, 1660, 1450, 18894, 2088, 32427, 2160, 9252, 9389, 1642, 85269, 10297, 1584, 9525, 14124, 4469, 8990, 2100, 9288, 64698, 10480, 20893, 33230, 1586, 9943, 16334, 68862, 9011, 14031, 6178, 21225, 1420, 32236, 2099, 2150, 26583, 2784, 8941, 9811, 27444, 50566 or 66428. The term “noncoding region” refers to 5′ and 3′ sequences which flank the coding region that are not translated into amino acids (also referred to as 5′ and 3′ untranslated regions).

[0698] Given the coding strand sequences encoding 140, 1470, 1686, 2089, 2427, 3702, 5891, 6428, 7181, 7660, 25641, 69583, 49863, 8897, 1682, 17667, 9235, 3703, 14171, 10359, 1660, 1450, 18894, 2088, 32427, 2160, 9252, 9389, 1642, 85269, 10297, 1584, 9525, 14124, 4469, 8990, 2100, 9288, 64698, 10480, 20893, 33230, 1586, 9943, 16334, 68862, 9011, 14031, 6178, 21225, 1420, 32236, 2099, 2150, 26583, 2784, 8941, 9811, 27444, 50566 or 66428 disclosed herein, antisense nucleic acids of the invention can be designed according to the rules of Watson and Crick base pairing. The antisense nucleic acid molecule can be complementary to the entire coding region of 140, 1470, 1686, 2089, 2427, 3702, 5891, 6428, 7181, 7660, 25641, 69583, 49863, 8897, 1682, 17667, 9235, 3703, 14171, 10359, 1660, 1450, 18894, 2088, 32427, 2160, 9252, 9389, 1642, 85269, 10297, 1584, 9525, 14124, 4469, 8990, 2100, 9288, 64698, 10480, 20893, 33230, 1586, 9943, 16334, 68862, 9011, 14031, 6178, 21225, 1420, 32236, 2099, 2150, 26583, 2784, 8941, 9811, 27444, 50566 or 66428 mRNA, but more preferably is an oligonucleotide which is antisense to only a portion of the coding or noncoding region of 140, 1470, 1686, 2089, 2427, 3702, 5891, 6428, 7181, 7660, 25641, 69583, 49863, 8897, 1682, 17667, 9235, 3703, 14171, 10359, 1660, 1450, 18894, 2088, 32427, 2160, 9252, 9389, 1642, 85269, 10297, 1584, 9525, 14124, 4469, 8990, 2100, 9288, 64698, 10480, 20893, 33230, 1586, 9943, 16334, 68862, 9011, 14031, 6178, 21225, 1420, 32236, 2099, 2150, 26583, 2784, 8941, 9811, 27444, 50566 or 66428 mRNA. For example, the antisense oligonucleotide can be complementary to the region surrounding the translation start site of 140, 1470, 1686, 2089, 2427, 3702, 5891, 6428, 7181, 7660, 25641, 69583, 49863, 8897, 1682, 17667, 9235, 3703, 14171, 10359, 1660, 1450, 18894, 2088, 32427, 2160, 9252, 9389, 1642, 85269, 10297, 1584, 9525, 14124, 4469, 8990, 2100, 9288, 64698, 10480, 20893, 33230, 1586, 9943, 16334, 68862, 9011, 14031, 6178, 21225, 1420, 32236, 2099, 2150, 26583, 2784, 8941, 9811, 27444, 50566 or 66428 mRNA. An antisense oligonucleotide can be, for example, about 5, 10, 15, 20, 25, 30, 35, 40, 45 or 50 nucleotides in length. An antisense nucleic acid of the invention can be constructed using chemical synthesis and enzymatic ligation reactions using procedures known in the art. For example, an antisense nucleic acid (e.g., an antisense oligonucleotide) can be chemically synthesized using naturally occurring nucleotides or variously modified nucleotides designed to increase the biological stability of the molecules or to increase the physical stability of the duplex formed between the antisense and sense nucleic acids, e.g., phosphorothioate derivatives and acridine substituted nucleotides can be used. Examples of modified nucleotides which can be used to generate the antisense nucleic acid include 5-fluorouracil, 5-bromouracil, 5-chlorouracil, 5-iodouracil, hypoxanthine, xantine, 4-acetylcytosine, 5-(carboxyhydroxylmethyl) uracil, 5-carboxymethylaminomethyl-2-thiouridine, 5-carboxymethylaminomethyluracil, dihydrouracil, beta-D-galactosylqueosine, inosine, N6-isopentenyladenine, 1-methylguanine, 1-methylinosine, 2,2-dimethylguanine, 2-methyladenine, 2-methylguanine, 3-methylcytosine, 5-methylcytosine, N6-adenine, 7-methylguanine, 5-methylaminomethyluracil, 5-methoxyaminomethyl-2-thiouracil, beta-D-mannosylqueosine, 5′-methoxycarboxymethyluracil, 5-methoxyuracil, 2-methylthio-N6-isopentenyladenine, uracil-5-oxyacetic acid (v), wybutoxosine, pseudouracil, queosine, 2-thiocytosine, 5-methyl-2-thiouracil, 2-thiouracil, 4-thiouracil, 5-methyluracil, uracil-5-oxyacetic acid methylester, uracil-5-oxyacetic acid (v), 5-methyl-2-thiouracil, 3-(3-amino-3-N-2-carboxypropyl) uracil, (acp3)w, and 2,6-diaminopurine. Alternatively, the antisense nucleic acid can be produced biologically using an expression vector into which a nucleic acid has been subcloned in an antisense orientation (i.e., RNA transcribed from the inserted nucleic acid will be of an antisense orientation to a target nucleic acid of interest). Antisense nucleic acid molecules used in the methods of the invention are further described above, in section IV.

[0699] In yet another embodiment, the 140, 1470, 1686, 2089, 2427, 3702, 5891, 6428, 7181, 7660, 25641, 69583, 49863, 8897, 1682, 17667, 9235, 3703, 14171, 10359, 1660, 1450, 18894, 2088, 32427, 2160, 9252, 9389, 1642, 85269, 10297, 1584, 9525, 14124, 4469, 8990, 2100, 9288, 64698, 10480, 20893, 33230, 1586, 9943, 16334, 68862, 9011, 14031, 6178, 21225, 1420, 32236, 2099, 2150, 26583, 2784, 8941, 9811, 27444, 50566 or 66428 nucleic acid molecules used in the methods of the present invention can be modified at the base moiety, sugar moiety or phosphate backbone to improve, e.g., the stability, hybridization, or solubility of the molecule. For example, the deoxyribose phosphate backbone of the nucleic acid molecules can be modified to generate peptide nucleic acids (see Hyrup B. et al. (1996) Bioorganic & Medicinal Chemistry 4 (1): 5-23). As used herein, the terms “peptide nucleic acids” or “PNAs” refer to nucleic acid mimics, e.g., DNA mimics, in which the deoxyribose phosphate backbone is replaced by a pseudopeptide backbone and only the four natural nucleobases are retained. The neutral backbone of PNAs has been shown to allow for specific hybridization to DNA and RNA under conditions of low ionic strength. The synthesis of PNA oligomers can be performed using standard solid phase peptide synthesis protocols as described in Hyrup B. et al. (1996) supra; Perry-O'Keefe et al. (1996) Proc. Natl. Acad. Sci. 93:14670-675.

[0700] PNAs of 140, 1470, 1686, 2089, 2427, 3702, 5891, 6428, 7181, 7660, 25641, 69583, 49863, 8897, 1682, 17667, 9235, 3703, 14171, 10359, 1660, 1450, 18894, 2088, 32427, 2160, 9252, 9389, 1642, 85269, 10297, 1584, 9525, 14124, 4469, 8990, 2100, 9288, 64698, 10480, 20893, 33230, 1586, 9943, 16334, 68862, 9011, 14031, 6178, 21225, 1420, 32236, 2099, 2150, 26583, 2784, 8941, 9811, 27444, 50566 or 66428 nucleic acid molecules can be used in the therapeutic and diagnostic applications described herein. For example, PNAs can be used as antisense or antigene agents for sequence-specific modulation of gene expression by, for example, inducing transcription or translation arrest or inhibiting replication. PNAs of 140, 1470, 1686, 2089, 2427, 3702, 5891, 6428, 7181, 7660, 25641, 69583, 49863, 8897, 1682, 17667, 9235, 3703, 14171, 10359, 1660, 1450, 18894, 2088, 32427, 2160, 9252, 9389, 1642, 85269, 10297, 1584, 9525, 14124, 4469, 8990, 2100, 9288, 64698, 10480, 20893, 33230, 1586, 9943, 16334, 68862, 9011, 14031, 6178, 21225, 1420, 32236, 2099, 2150, 26583, 2784, 8941, 9811, 27444, 50566 or 66428 nucleic acid molecules can also be used in the analysis of single base pair mutations in a gene, (e.g., by PNA-directed PCR clamping); as ‘artificial restriction enzymes’ when used in combination with other enzymes, (e.g., S1 nucleases (Hyrup B. et al. (1996) supra)); or as probes or primers for DNA sequencing or hybridization (Hyrup B. et al. (1996) supra; Perry-O'Keefe et al. (1996) supra).

[0701] In another embodiment, PNAs of 140, 1470, 1686, 2089, 2427, 3702, 5891, 6428, 7181, 7660, 25641, 69583, 49863, 8897, 1682, 17667, 9235, 3703, 14171, 10359, 1660, 1450, 18894, 2088, 32427, 2160, 9252, 9389, 1642, 85269, 10297, 1584, 9525, 14124, 4469, 8990, 2100, 9288, 64698, 10480, 20893, 33230, 1586, 9943, 16334, 68862, 9011, 14031, 6178, 21225, 1420, 32236, 2099, 2150, 26583, 2784, 8941, 9811, 27444, 50566 or 66428 can be modified, (e.g., to enhance their stability or cellular uptake), by attaching lipophilic or other helper groups to PNA, by the formation of PNA-DNA chimeras, or by the use of liposomes or other techniques of drug delivery known in the art. For example, PNA-DNA chimeras of 140, 1470, 1686, 2089, 2427, 3702, 5891, 6428, 7181, 7660, 25641, 69583, 49863, 8897, 1682, 17667, 9235, 3703, 14171, 10359, 1660, 1450, 18894, 2088, 32427, 2160, 9252, 9389, 1642, 85269, 10297, 1584, 9525, 14124, 4469, 8990, 2100, 9288, 64698, 10480, 20893, 33230, 1586, 9943, 16334, 68862, 9011, 14031, 6178, 21225, 1420, 32236, 2099, 2150, 26583, 2784, 8941, 9811, 27444, 50566 or 66428 nucleic acid molecules can be generated which may combine the advantageous properties of PNA and DNA. Such chimeras allow DNA recognition enzymes, (e.g., RNAse H and DNA polymerases), to interact with the DNA portion while the PNA portion would provide high binding affinity and specificity. PNA-DNA chimeras can be linked using linkers of appropriate lengths selected in terms of base stacking, number of bonds between the nucleobases, and orientation (Hyrup B. et al. (1996) supra). The synthesis of PNA-DNA chimeras can be performed as described in Hyrup B. et al. (1996) supra and Finn P. J. et al. (1996) Nucleic Acids Res. 24 (17): 3357-63. For example, a DNA chain can be synthesized on a solid support using standard phosphoramidite coupling chemistry and modified nucleoside analogs, e.g., 5′-(4-methoxytrityl)amino-5′-deoxy-thymidine phosphoramidite, can be used as a between the PNA and the 5′ end of DNA (Mag, M. et al. (1989) Nucleic Acid Res. 17: 5973-88). PNA monomers are then coupled in a stepwise manner to produce a chimeric molecule with a 5′ PNA segment and a 3′ DNA segment (Finn P. J. et al. (1996) supra). Alternatively, chimeric molecules can be synthesized with a 5′ DNA segment and a 3′ PNA segment (Peterser, K. H. et al. (1975) Bioorganic Med. Chem. Lett. 5: 1119-11124).

[0702] In other embodiments, the oligonucleotide used in the methods of the invention may include other appended groups such as peptides (e.g., for targeting host cell receptors in vivo), or agents facilitating transport across the cell membrane (see, e.g., Letsinger et al. (1989) Proc. Natl. Acad. Sci. USA 86:6553-6556; Lemaitre et al. (1987) Proc. Natl. Acad. Sci. USA 84:648-652; PCT Publication No. WO88/09810) or the blood-brain barrier (see, e.g., PCT Publication No. WO89/10134). In addition, oligonucleotides can be modified with hybridization-triggered cleavage agents (See, e.g., Krol et al. (1988) Bio-Techniques 6:958-976) or intercalating agents. (See, e.g., Zon (1988) Pharm. Res. 5:539-549). To this end, the oligonucleotide may be conjugated to another molecule, (e.g., a peptide, hybridization triggered cross-linking agent, transport agent, or hybridization-triggered cleavage agent).

[0703] Isolated 140, 1470, 1686, 2089, 2427, 3702, 5891, 6428, 7181, 7660, 25641, 69583, 49863, 8897, 1682, 17667, 9235, 3703, 14171, 10359, 1660, 1450, 18894, 2088, 32427, 2160, 9252, 9389, 1642, 85269, 10297, 1584, 9525, 14124, 4469, 8990, 2100, 9288, 64698, 10480, 20893, 33230, 1586, 9943, 16334, 68862, 9011, 14031, 6178, 21225, 1420, 32236, 2099, 2150, 26583, 2784, 8941, 9811, 27444, 50566 or 66428 Proteins and Anti-140, 1470, 1686, 2089, 2427, 3702, 5891, 6428, 7181, 7660, 25641, 69583, 49863, 8897, 1682, 17667, 9235, 3703, 14171, 10359, 1660, 1450, 18894, 2088, 32427, 2160, 9252, 9389, 1642, 85269, 10297, 1584, 9525, 14124, 4469, 8990, 2100, 9288, 64698, 10480, 20893, 33230, 1586, 9943, 16334, 68862, 9011, 14031, 6178, 21225, 1420, 32236, 2099, 2150, 26583, 2784, 8941, 9811, 27444, 50566 or 66428 Antibodies Used in the Methods of the Invention

[0704] The methods of the invention include the use of isolated 140, 1470, 1686, 2089, 2427, 3702, 5891, 6428, 7181, 7660, 25641, 69583, 49863, 8897, 1682, 17667, 9235, 3703, 14171, 10359, 1660, 1450, 18894, 2088, 32427, 2160, 9252, 9389, 1642, 85269, 10297, 1584, 9525, 14124, 4469, 8990, 2100, 9288, 64698, 10480, 20893, 33230, 1586, 9943, 16334, 68862, 9011, 14031, 6178, 21225, 1420, 32236, 2099, 2150, 26583, 2784, 8941, 9811, 27444, 50566 or 66428 proteins, and biologically active portions thereof, as well as polypeptide fragments suitable for use as immunogens to raise anti-140, 1470, 1686, 2089, 2427, 3702, 5891, 6428, 7181, 7660, 25641, 69583, 49863, 8897, 1682, 17667, 9235, 3703, 14171, 10359, 1660, 1450, 18894, 2088, 32427, 2160, 9252, 9389, 1642, 85269, 10297, 1584, 9525, 14124, 4469, 8990, 2100, 9288, 64698, 10480, 20893, 33230, 1586, 9943, 16334, 68862, 9011, 14031, 6178, 21225, 1420, 32236, 2099, 2150, 26583, 2784, 8941, 9811, 27444, 50566 or 66428 antibodies. In one embodiment, native 140, 1470, 1686, 2089, 2427, 3702, 5891, 6428, 7181, 7660, 25641, 69583, 49863, 8897, 1682, 17667, 9235, 3703, 14171, 10359, 1660, 1450, 18894, 2088, 32427, 2160, 9252, 9389, 1642, 85269, 10297, 1584, 9525, 14124, 4469, 8990, 2100, 9288, 64698, 10480, 20893, 33230, 1586, 9943, 16334, 68862, 9011, 14031, 6178, 21225, 1420, 32236, 2099, 2150, 26583, 2784, 8941, 9811, 27444, 50566 or 66428 proteins can be isolated from cells or tissue sources by an appropriate purification scheme using standard protein purification techniques. In another embodiment, 140, 1470, 1686, 2089, 2427, 3702, 5891, 6428, 7181, 7660, 25641, 69583, 49863, 8897, 1682, 17667, 9235, 3703, 14171, 10359, 1660, 1450, 18894, 2088, 32427, 2160, 9252, 9389, 1642, 85269, 10297, 1584, 9525, 14124, 4469, 8990, 2100, 9288, 64698, 10480, 20893, 33230, 1586, 9943, 16334, 68862, 9011, 14031, 6178, 21225, 1420, 32236, 2099, 2150, 26583, 2784, 8941, 9811, 27444, 50566 or 66428 proteins are produced by recombinant DNA techniques. Alternative to recombinant expression, a 140, 1470, 1686, 2089, 2427, 3702, 5891, 6428, 7181, 7660, 25641, 69583, 49863, 8897, 1682, 17667, 9235, 3703, 14171, 10359, 1660, 1450, 18894, 2088, 32427, 2160, 9252, 9389, 1642, 85269, 10297, 1584, 9525, 14124, 4469, 8990, 2100, 9288, 64698, 10480, 20893, 33230, 1586, 9943, 16334, 68862, 9011, 14031, 6178, 21225, 1420, 32236, 2099, 2150, 26583, 2784, 8941, 9811, 27444, 50566 or 66428 protein or polypeptide can be synthesized chemically using standard peptide synthesis techniques.

[0705] As used herein, a “biologically active portion” of a 140, 1470, 1686, 2089, 2427, 3702, 5891, 6428, 7181, 7660, 25641, 69583, 49863, 8897, 1682, 17667, 9235, 3703, 14171, 10359, 1660, 1450, 18894, 2088, 32427, 2160, 9252, 9389, 1642, 85269, 10297, 1584, 9525, 14124, 4469, 8990, 2100, 9288, 64698, 10480, 20893, 33230, 1586, 9943, 16334, 68862, 9011, 14031, 6178, 21225, 1420, 32236, 2099, 2150, 26583, 2784, 8941, 9811, 27444, 50566 or 66428 protein includes a fragment of a 140, 1470, 1686, 2089, 2427, 3702, 5891, 6428, 7181, 7660, 25641, 69583, 49863, 8897, 1682, 17667, 9235, 3703, 14171, 10359, 1660, 1450, 18894, 2088, 32427, 2160, 9252, 9389, 1642, 85269, 10297, 1584, 9525, 14124, 4469, 8990, 2100, 9288, 64698, 10480, 20893, 33230, 1586, 9943, 16334, 68862, 9011, 14031, 6178, 21225, 1420, 32236, 2099, 2150, 26583, 2784, 8941, 9811, 27444, 50566 or 66428 protein having a 140, 1470, 1686, 2089, 2427, 3702, 5891, 6428, 7181, 7660, 25641, 69583, 49863, 8897, 1682, 17667, 9235, 3703, 14171, 10359, 1660, 1450, 18894, 2088, 32427, 2160, 9252, 9389, 1642, 85269, 10297, 1584, 9525, 14124, 4469, 8990, 2100, 9288, 64698, 10480, 20893, 33230, 1586, 9943, 16334, 68862, 9011, 14031, 6178, 21225, 1420, 32236, 2099, 2150, 26583, 2784, 8941, 9811, 27444, 50566 or 66428 activity. Biologically active portions of a 140, 1470, 1686, 2089, 2427, 3702, 5891, 6428, 7181, 7660, 25641, 69583, 49863, 8897, 1682, 17667, 9235, 3703, 14171, 10359, 1660, 1450, 18894, 2088, 32427, 2160, 9252, 9389, 1642, 85269, 10297, 1584, 9525, 14124, 4469, 8990, 2100, 9288, 64698, 10480, 20893, 33230, 1586, 9943, 16334, 68862, 9011, 14031, 6178, 21225, 1420, 32236, 2099, 2150, 26583, 2784, 8941, 9811, 27444, 50566 or 66428 protein include peptides comprising amino acid sequences sufficiently identical to or derived from the amino acid sequence of the 140, 1470, 1686, 2089, 2427, 3702, 5891, 6428, 7181, 7660, 25641, 69583, 49863, 8897, 1682, 17667, 9235, 3703, 14171, 10359, 1660, 1450, 18894, 2088, 32427, 2160, 9252, 9389, 1642, 85269, 10297, 1584, 9525, 14124, 4469, 8990, 2100, 9288, 64698, 10480, 20893, 33230, 1586, 9943, 16334, 68862, 9011, 14031, 6178, 21225, 1420, 32236, 2099, 2150, 26583, 2784, 8941, 9811, 27444, 50566 or 66428 protein, e.g., the amino acid sequence shown in SEQ ID NO:2, 4, 6, 8, 10, 12, 14, 16, 18, 20, 22, 24, 26, 28, 30, 32, 34, 36, 38, 40, 42, 44, 46, 48, 50, 52, 54, 56, 58, 60, 62, 64, 66, 68, 70, 72, 74, 76, 78, 80, 82, 84, 86, 88, 90, 92, 94, 96, 98, 100, 102, 104, 106, 108, 110, 112, 114, 116, 118, 120 or 122, which include fewer amino acids than the full length 140, 1470, 1686, 2089, 2427, 3702, 5891, 6428, 7181, 7660, 25641, 69583, 49863, 8897, 1682, 17667, 9235, 3703, 14171, 10359, 1660, 1450, 18894, 2088, 32427, 2160, 9252, 9389, 1642, 85269, 10297, 1584, 9525, 14124, 4469, 8990, 2100, 9288, 64698, 10480, 20893, 33230, 1586, 9943, 16334, 68862, 9011, 14031, 6178, 21225, 1420, 32236, 2099, 2150, 26583, 2784, 8941, 9811, 27444, 50566 or 66428 proteins, and exhibit at least one activity of a 140, 1470, 1686, 2089, 2427, 3702, 5891, 6428, 7181, 7660, 25641, 69583, 49863, 8897, 1682, 17667, 9235, 3703, 14171, 10359, 1660, 1450, 18894, 2088, 32427, 2160, 9252, 9389, 1642, 85269, 10297, 1584, 9525, 14124, 4469, 8990, 2100, 9288, 64698, 10480, 20893, 33230, 1586, 9943, 16334, 68862, 9011, 14031, 6178, 21225, 1420, 32236, 2099, 2150, 26583, 2784, 8941, 9811, 27444, 50566 or 66428 protein. Typically, biologically active portions comprise a domain or motif with at least one activity of the 140, 1470, 1686, 2089, 2427, 3702, 5891, 6428, 7181, 7660, 25641, 69583, 49863, 8897, 1682, 17667, 9235, 3703, 14171, 10359, 1660, 1450, 18894, 2088, 32427, 2160, 9252, 9389, 1642, 85269, 10297, 1584, 9525, 14124, 4469, 8990, 2100, 9288, 64698, 10480, 20893, 33230, 1586, 9943, 16334, 68862, 9011, 14031, 6178, 21225, 1420, 32236, 2099, 2150, 26583, 2784, 8941, 9811, 27444, 50566 or 66428 protein (e.g., the N-terminal region of the 140, 1470, 1686, 2089, 2427, 3702, 5891, 6428, 7181, 7660, 25641, 69583, 49863, 8897, 1682, 17667, 9235, 3703, 14171, 10359, 1660, 1450, 18894, 2088, 32427, 2160, 9252, 9389, 1642, 85269, 10297, 1584, 9525, 14124, 4469, 8990, 2100, 9288, 64698, 10480, 20893, 33230, 1586, 9943, 16334, 68862, 9011, 14031, 6178, 21225, 1420, 32236, 2099, 2150, 26583, 2784, 8941, 9811, 27444, 50566 or 66428 protein that is believed to be involved in the regulation of apoptotic activity). A biologically active portion of a 140, 1470, 1686, 2089, 2427, 3702, 5891, 6428, 7181, 7660, 25641, 69583, 49863, 8897, 1682, 17667, 9235, 3703, 14171, 10359, 1660, 1450, 18894, 2088, 32427, 2160, 9252, 9389, 1642, 85269, 10297, 1584, 9525, 14124, 4469, 8990, 2100, 9288, 64698, 10480, 20893, 33230, 1586, 9943, 16334, 68862, 9011, 14031, 6178, 21225, 1420, 32236, 2099, 2150, 26583, 2784, 8941, 9811, 27444, 50566 or 66428 protein can be a polypeptide which is, for example, 25, 50, 75, 100, 125, 150, 175, 200, 250, 300 or more amino acids in length. Biologically active portions of a 140, 1470, 1686, 2089, 2427, 3702, 5891, 6428, 7181, 7660, 25641, 69583, 49863, 8897, 1682, 17667, 9235, 3703, 14171, 10359, 1660, 1450, 18894, 2088, 32427, 2160, 9252, 9389, 1642, 85269, 10297, 1584, 9525, 14124, 4469, 8990, 2100, 9288, 64698, 10480, 20893, 33230, 1586, 9943, 16334, 68862, 9011, 14031, 6178, 21225, 1420, 32236, 2099, 2150, 26583, 2784, 8941, 9811, 27444, 50566 or 66428 protein can be used as targets for developing agents which modulate a 140, 1470, 1686, 2089, 2427, 3702, 5891, 6428, 7181, 7660, 25641, 69583, 49863, 8897, 1682, 17667, 9235, 3703, 14171, 10359, 1660, 1450, 18894, 2088, 32427, 2160, 9252, 9389, 1642, 85269, 10297, 1584, 9525, 14124, 4469, 8990, 2100, 9288, 64698, 10480, 20893, 33230, 1586, 9943, 16334, 68862, 9011, 14031, 6178, 21225, 1420, 32236, 2099, 2150, 26583, 2784, 8941, 9811, 27444, 50566 or 66428 activity.

[0706] In a preferred embodiment, the 140, 1470, 1686, 2089, 2427, 3702, 5891, 6428, 7181, 7660, 25641, 69583, 49863, 8897, 1682, 17667, 9235, 3703, 14171, 10359, 1660, 1450, 18894, 2088, 32427, 2160, 9252, 9389, 1642, 85269, 10297, 1584, 9525, 14124, 4469, 8990, 2100, 9288, 64698, 10480, 20893, 33230, 1586, 9943, 16334, 68862, 9011, 14031, 6178, 21225, 1420, 32236, 2099, 2150, 26583, 2784, 8941, 9811, 27444, 50566 or 66428 protein used in the methods of the invention has an amino acid sequence shown in SEQ ID NO:2, 4, 6, 8, 10, 12, 14, 16, 18, 20, 22, 24, 26, 28, 30, 32, 34, 36, 38, 40, 42, 44, 46, 48, 50, 52, 54, 56, 58, 60, 62, 64, 66, 68, 70, 72, 74, 76, 78, 80, 82, 84, 86, 88, 90, 92, 94, 96, 98, 100, 102, 104, 106, 108, 110, 112, 114, 116, 118, 120 or 122. In other embodiments, the 140, 1470, 1686, 2089, 2427, 3702, 5891, 6428, 7181, 7660, 25641, 69583, 49863, 8897, 1682, 17667, 9235, 3703, 14171, 10359, 1660, 1450, 18894, 2088, 32427, 2160, 9252, 9389, 1642, 85269, 10297, 1584, 9525, 14124, 4469, 8990, 2100, 9288, 64698, 10480, 20893, 33230, 1586, 9943, 16334, 68862, 9011, 14031, 6178, 21225, 1420, 32236, 2099, 2150, 26583, 2784, 8941, 9811, 27444, 50566 or 66428 protein is substantially identical to SEQ ID NO:2, 4, 6, 8, 10, 12, 14, 16, 18, 20, 22, 24, 26, 28, 30, 32, 34, 36, 38, 40, 42, 44, 46, 48, 50, 52, 54, 56, 58, 60, 62, 64, 66, 68, 70, 72, 74, 76, 78, 80, 82, 84, 86, 88, 90, 92, 94, 96, 98, 100, 102, 104, 106, 108, 110, 112, 114, 116, 118, 120 or 122, and retains the functional activity of the protein of SEQ ID NO:2, 4, 6, 8, 10, 12, 14, 16, 18, 20, 22, 24, 26, 28, 30, 32, 34, 36, 38, 40, 42, 44, 46, 48, 50, 52, 54, 56, 58, 60, 62, 64, 66, 68, 70, 72, 74, 76, 78, 80, 82, 84, 86, 88, 90, 92, 94, 96, 98, 100, 102, 104, 106, 108, 110, 112, 114, 116, 118, 120 or 122, yet differs in amino acid sequence due to natural allelic variation or mutagenesis, as described in detail in subsection V above. Accordingly, in another embodiment, the 140, 1470, 1686, 2089, 2427, 3702, 5891, 6428, 7181, 7660, 25641, 69583, 49863, 8897, 1682, 17667, 9235, 3703, 14171, 10359, 1660, 1450, 18894, 2088, 32427, 2160, 9252, 9389, 1642, 85269, 10297, 1584, 9525, 14124, 4469, 8990, 2100, 9288, 64698, 10480, 20893, 33230, 1586, 9943, 16334, 68862, 9011, 14031, 6178, 21225, 1420, 32236, 2099, 2150, 26583, 2784, 8941, 9811, 27444, 50566 or 66428 protein used in the methods of the invention is a protein which comprises an amino acid sequence at least about 50%, 55%, 60%, 65%, 70%, 75%, 80%, 85%, 90%, 95%, 96%, 97%, 98%, 99% or more identical to SEQ ID NO:2, 4, 6, 8, 10, 12, 14, 16, 18, 20, 22, 24, 26, 28, 30, 32, 34, 36, 38, 40, 42, 44, 46, 48, 50, 52, 54, 56, 58, 60, 62, 64, 66, 68, 70, 72, 74, 76, 78, 80, 82, 84, 86, 88, 90, 92, 94, 96, 98, 100, 102, 104, 106, 108, 110, 112, 114, 116, 118, 120 or 122.

[0707] To determine the percent identity of two amino acid sequences or of two nucleic acid sequences, the sequences are aligned for optimal comparison purposes (e.g., gaps can be introduced in one or both of a first and a second amino acid or nucleic acid sequence for optimal alignment and non-identical sequences can be disregarded for comparison purposes). In a preferred embodiment, the length of a reference sequence aligned for comparison purposes is at least 30%, preferably at least 40%, more preferably at least 50%, even more preferably at least 60%, and even more preferably at least 70%, 80%, or 90% of the length of the reference sequence (e.g., when aligning a second sequence to the 140, 1470, 1686, 2089, 2427, 3702, 5891, 6428, 7181, 7660, 25641, 69583, 49863, 8897, 1682, 17667, 9235, 3703, 14171, 10359, 1660, 1450, 18894, 2088, 32427, 2160, 9252, 9389, 1642, 85269, 10297, 1584, 9525, 14124, 4469, 8990, 2100, 9288, 64698, 10480, 20893, 33230, 1586, 9943, 16334, 68862, 9011, 14031, 6178, 21225, 1420, 32236, 2099, 2150, 26583, 2784, 8941, 9811, 27444, 50566 or 66428 amino acid sequence of SEQ ID NO:2, 4, 6, 8, 10, 12, 14, 16, 18, 20, 22, 24, 26, 28, 30, 32, 34, 36, 38, 40, 42, 44, 46, 48, 50, 52, 54, 56, 58, 60, 62, 64, 66, 68, 70, 72, 74, 76, 78, 80, 82, 84, 86, 88, 90, 92, 94, 96, 98, 100, 102, 104, 106, 108, 110, 112, 114, 116, 118, 120 or 122 having 500 amino acid residues, at least 75, preferably at least 150, more preferably at least 225, even more preferably at least 300, and even more preferably at least 400 or more amino acid residues are aligned). The amino acid residues or nucleotides at corresponding amino acid positions or nucleotide positions are then compared. When a position in the first sequence is occupied by the same amino acid residue or nucleotide as the corresponding position in the second sequence, then the molecules are identical at that position (as used herein amino acid or nucleic acid “identity” is equivalent to amino acid or nucleic acid “homology”). The percent identity between the two sequences is a function of the number of identical positions shared by the sequences, taking into account the number of gaps, and the length of each gap, which need to be introduced for optimal alignment of the two sequences.

[0708] The comparison of sequences and determination of percent identity between two sequences can be accomplished using a mathematical algorithm. In a preferred embodiment, the percent identity between two amino acid sequences is determined using the Needleman and Wunsch (J. Mol. Biol. 48:444-453 (1970)) algorithm which has been incorporated into the GAP program in the GCG software package, using either a Blosum 62 matrix or a PAM250 matrix, and a gap weight of 16, 14, 12, 10, 8, 6, or 4 and a length weight of 1, 2, 3, 4, 5, or 6. In yet another preferred embodiment, the percent identity between two nucleotide sequences is determined using the GAP program in the GCG software package, using a NWSgapdna.CMP matrix and a gap weight of 40, 50, 60, 70, or 80 and a length weight of 1, 2, 3, 4, 5, or 6. In another embodiment, the percent identity between two amino acid or nucleotide sequences is determined using the algorithm of E. Meyers and W. Miller (Comput. Appl. Biosci. 4:11-17 (1988)) which has been incorporated into the ALIGN program (version 2.0 or 2.0U), using a PAM120 weight residue table, a gap length penalty of 12 and a gap penalty of 4.

[0709] The methods of the invention may also use 140, 1470, 1686, 2089, 2427, 3702, 5891, 6428, 7181, 7660, 25641, 69583, 49863, 8897, 1682, 17667, 9235, 3703, 14171, 10359, 1660, 1450, 18894, 2088, 32427, 2160, 9252, 9389, 1642, 85269, 10297, 1584, 9525, 14124, 4469, 8990, 2100, 9288, 64698, 10480, 20893, 33230, 1586, 9943, 16334, 68862, 9011, 14031, 6178, 21225, 1420, 32236, 2099, 2150, 26583, 2784, 8941, 9811, 27444, 50566 or 66428 chimeric or fusion proteins. As used herein, a 140, 1470, 1686, 2089, 2427, 3702, 5891, 6428, 7181, 7660, 25641, 69583, 49863, 8897, 1682, 17667, 9235, 3703, 14171, 10359, 1660, 1450, 18894, 2088, 32427, 2160, 9252, 9389, 1642, 85269, 10297, 1584, 9525, 14124, 4469, 8990, 2100, 9288, 64698, 10480, 20893, 33230, 1586, 9943, 16334, 68862, 9011, 14031, 6178, 21225, 1420, 32236, 2099, 2150, 26583, 2784, 8941, 9811, 27444, 50566 or 66428 “chimeric protein” or “fusion protein” comprises a 140, 1470, 1686, 2089, 2427, 3702, 5891, 6428, 7181, 7660, 25641, 69583, 49863, 8897, 1682, 17667, 9235, 3703, 14171, 10359, 1660, 1450, 18894, 2088, 32427, 2160, 9252, 9389, 1642, 85269, 10297, 1584, 9525, 14124, 4469, 8990, 2100, 9288, 64698, 10480, 20893, 33230, 1586, 9943, 16334, 68862, 9011, 14031, 6178, 21225, 1420, 32236, 2099, 2150, 26583, 2784, 8941, 9811, 27444, 50566 or 66428 polypeptide operatively linked to a non-140, 1470, 1686, 2089, 2427, 3702, 5891, 6428, 7181, 7660, 25641, 69583, 49863, 8897, 1682, 17667, 9235, 3703, 14171, 10359, 1660, 1450, 18894, 2088, 32427, 2160, 9252, 9389, 1642, 85269, 10297, 1584, 9525, 14124, 4469, 8990, 2100, 9288, 64698, 10480, 20893, 33230, 1586, 9943, 16334, 68862, 9011, 14031, 6178, 21225, 1420, 32236, 2099, 2150, 26583, 2784, 8941, 9811, 27444, 50566 or 66428 polypeptide. An “140, 1470, 1686, 2089, 2427, 3702, 5891, 6428, 7181, 7660, 25641, 69583, 49863, 8897, 1682, 17667, 9235, 3703, 14171, 10359, 1660, 1450, 18894, 2088, 32427, 2160, 9252, 9389, 1642, 85269, 10297, 1584, 9525, 14124, 4469, 8990, 2100, 9288, 64698, 10480, 20893, 33230, 1586, 9943, 16334, 68862, 9011, 14031, 6178, 21225, 1420, 32236, 2099, 2150, 26583, 2784, 8941, 9811, 27444, 50566 or 66428 polypeptide” refers to a polypeptide having an amino acid sequence corresponding to a 140, 1470, 1686, 2089, 2427, 3702, 5891, 6428, 7181, 7660, 25641, 69583, 49863, 8897, 1682, 17667, 9235, 3703, 14171, 10359, 1660, 1450, 18894, 2088, 32427, 2160, 9252, 9389, 1642, 85269, 10297, 1584, 9525, 14124, 4469, 8990, 2100, 9288, 64698, 10480, 20893, 33230, 1586, 9943, 16334, 68862, 9011, 14031, 6178, 21225, 1420, 32236, 2099, 2150, 26583, 2784, 8941, 9811, 27444, 50566 or 66428 molecule, whereas a “non-140, 1470, 1686, 2089, 2427, 3702, 5891, 6428, 7181, 7660, 25641, 69583, 49863, 8897, 1682, 17667, 9235, 3703, 14171, 10359, 1660, 1450, 18894, 2088, 32427, 2160, 9252, 9389, 1642, 85269, 10297, 1584, 9525, 14124, 4469, 8990, 2100, 9288, 64698, 10480, 20893, 33230, 1586, 9943, 16334, 68862, 9011, 14031, 6178, 21225, 1420, 32236, 2099, 2150, 26583, 2784, 8941, 9811, 27444, 50566 or 66428 polypeptide” refers to a polypeptide having an amino acid sequence corresponding to a protein which is not substantially homologous to the 140, 1470, 1686, 2089, 2427, 3702, 5891, 6428, 7181, 7660, 25641, 69583, 49863, 8897, 1682, 17667, 9235, 3703, 14171, 10359, 1660, 1450, 18894, 2088, 32427, 2160, 9252, 9389, 1642, 85269, 10297, 1584, 9525, 14124, 4469, 8990, 2100, 9288, 64698, 10480, 20893, 33230, 1586, 9943, 16334, 68862, 9011, 14031, 6178, 21225, 1420, 32236, 2099, 2150, 26583, 2784, 8941, 9811, 27444, 50566 or 66428 protein, e.g., a protein which is different from the 140, 1470, 1686, 2089, 2427, 3702, 5891, 6428, 7181, 7660, 25641, 69583, 49863, 8897, 1682, 17667, 9235, 3703, 14171, 10359, 1660, 1450, 18894, 2088, 32427, 2160, 9252, 9389, 1642, 85269, 10297, 1584, 9525, 14124, 4469, 8990, 2100, 9288, 64698, 10480, 20893, 33230, 1586, 9943, 16334, 68862, 9011, 14031, 6178, 21225, 1420, 32236, 2099, 2150, 26583, 2784, 8941, 9811, 27444, 50566 or 66428 protein and which is derived from the same or a different organism. Within a 140, 1470, 1686, 2089, 2427, 3702, 5891, 6428, 7181, 7660, 25641, 69583, 49863, 8897, 1682, 17667, 9235, 3703, 14171, 10359, 1660, 1450, 18894, 2088, 32427, 2160, 9252, 9389, 1642, 85269, 10297, 1584, 9525, 14124, 4469, 8990, 2100, 9288, 64698, 10480, 20893, 33230, 1586, 9943, 16334, 68862, 9011, 14031, 6178, 21225, 1420, 32236, 2099, 2150, 26583, 2784, 8941, 9811, 27444, 50566 or 66428 fusion protein the 140, 1470, 1686, 2089, 2427, 3702, 5891, 6428, 7181, 7660, 25641, 69583, 49863, 8897, 1682, 17667, 9235, 3703, 14171, 10359, 1660, 1450, 18894, 2088, 32427, 2160, 9252, 9389, 1642, 85269, 10297, 1584, 9525, 14124, 4469, 8990, 2100, 9288, 64698, 10480, 20893, 33230, 1586, 9943, 16334, 68862, 9011, 14031, 6178, 21225, 1420, 32236, 2099, 2150, 26583, 2784, 8941, 9811, 27444, 50566 or 66428 polypeptide can correspond to all or a portion of a 140, 1470, 1686, 2089, 2427, 3702, 5891, 6428, 7181, 7660, 25641, 69583, 49863, 8897, 1682, 17667, 9235, 3703, 14171, 10359, 1660, 1450, 18894, 2088, 32427, 2160, 9252, 9389, 1642, 85269, 10297, 1584, 9525, 14124, 4469, 8990, 2100, 9288, 64698, 10480, 20893, 33230, 1586, 9943, 16334, 68862, 9011, 14031, 6178, 21225, 1420, 32236, 2099, 2150, 26583, 2784, 8941, 9811, 27444, 50566 or 66428 protein. In a preferred embodiment, a 140, 1470, 1686, 2089, 2427, 3702, 5891, 6428, 7181, 7660, 25641, 69583, 49863, 8897, 1682, 17667, 9235, 3703, 14171, 10359, 1660, 1450, 18894, 2088, 32427, 2160, 9252, 9389, 1642, 85269, 10297, 1584, 9525, 14124, 4469, 8990, 2100, 9288, 64698, 10480, 20893, 33230, 1586, 9943, 16334, 68862, 9011, 14031, 6178, 21225, 1420, 32236, 2099, 2150, 26583, 2784, 8941, 9811, 27444, 50566 or 66428 fusion protein comprises at least one biologically active portion of a 140, 1470, 1686, 2089, 2427, 3702, 5891, 6428, 7181, 7660, 25641, 69583, 49863, 8897, 1682, 17667, 9235, 3703, 14171, 10359, 1660, 1450, 18894, 2088, 32427, 2160, 9252, 9389, 1642, 85269, 10297, 1584, 9525, 14124, 4469, 8990, 2100, 9288, 64698, 10480, 20893, 33230, 1586, 9943, 16334, 68862, 9011, 14031, 6178, 21225, 1420, 32236, 2099, 2150, 26583, 2784, 8941, 9811, 27444, 50566 or 66428 protein. In another preferred embodiment, a 140, 1470, 1686, 2089, 2427, 3702, 5891, 6428, 7181, 7660, 25641, 69583, 49863, 8897, 1682, 17667, 9235, 3703, 14171, 10359, 1660, 1450, 18894, 2088, 32427, 2160, 9252, 9389, 1642, 85269, 10297, 1584, 9525, 14124, 4469, 8990, 2100, 9288, 64698, 10480, 20893, 33230, 1586, 9943, 16334, 68862, 9011, 14031, 6178, 21225, 1420, 32236, 2099, 2150, 26583, 2784, 8941, 9811, 27444, 50566 or 66428 fusion protein comprises at least two biologically active portions of a 140, 1470, 1686, 2089, 2427, 3702, 5891, 6428, 7181, 7660, 25641, 69583, 49863, 8897, 1682, 17667, 9235, 3703, 14171, 10359, 1660, 1450, 18894, 2088, 32427, 2160, 9252, 9389, 1642, 85269, 10297, 1584, 9525, 14124, 4469, 8990, 2100, 9288, 64698, 10480, 20893, 33230, 1586, 9943, 16334, 68862, 9011, 14031, 6178, 21225, 1420, 32236, 2099, 2150, 26583, 2784, 8941, 9811, 27444, 50566 or 66428 protein. Within the fusion protein, the term “operatively linked” is intended to indicate that the 140, 1470, 1686, 2089, 2427, 3702, 5891, 6428, 7181, 7660, 25641, 69583, 49863, 8897, 1682, 17667, 9235, 3703, 14171, 10359, 1660, 1450, 18894, 2088, 32427, 2160, 9252, 9389, 1642, 85269, 10297, 1584, 9525, 14124, 4469, 8990, 2100, 9288, 64698, 10480, 20893, 33230, 1586, 9943, 16334, 68862, 9011, 14031, 6178, 21225, 1420, 32236, 2099, 2150, 26583, 2784, 8941, 9811, 27444, 50566 or 66428 polypeptide and the non-140, 1470, 1686, 2089, 2427, 3702, 5891, 6428, 7181, 7660, 25641, 69583, 49863, 8897, 1682, 17667, 9235, 3703, 14171, 10359, 1660, 1450, 18894, 2088, 32427, 2160, 9252, 9389, 1642, 85269, 10297, 1584, 9525, 14124, 4469, 8990, 2100, 9288, 64698, 10480, 20893, 33230, 1586, 9943, 16334, 68862, 9011, 14031, 6178, 21225, 1420, 32236, 2099, 2150, 26583, 2784, 8941, 9811, 27444, 50566 or 66428 polypeptide are fused in-frame to each other. The non-140, 1470, 1686, 2089, 2427, 3702, 5891, 6428, 7181, 7660, 25641, 69583, 49863, 8897, 1682, 17667, 9235, 3703, 14171, 10359, 1660, 1450, 18894, 2088, 32427, 2160, 9252, 9389, 1642, 85269, 10297, 1584, 9525, 14124, 4469, 8990, 2100, 9288, 64698, 10480, 20893, 33230, 1586, 9943, 16334, 68862, 9011, 14031, 6178, 21225, 1420, 32236, 2099, 2150, 26583, 2784, 8941, 9811, 27444, 50566 or 66428 polypeptide can be fused to the N-terminus or C-terminus of the 140, 1470, 1686, 2089, 2427, 3702, 5891, 6428, 7181, 7660, 25641, 69583, 49863, 8897, 1682, 17667, 9235, 3703, 14171, 10359, 1660, 1450, 18894, 2088, 32427, 2160, 9252, 9389, 1642, 85269, 10297, 1584, 9525, 14124, 4469, 8990, 2100, 9288, 64698, 10480, 20893, 33230, 1586, 9943, 16334, 68862, 9011, 14031, 6178, 21225, 1420, 32236, 2099, 2150, 26583, 2784, 8941, 9811, 27444, 50566 or 66428 polypeptide.

[0710] For example, in one embodiment, the fusion protein is a GST-140, 1470, 1686, 2089, 2427, 3702, 5891, 6428, 7181, 7660, 25641, 69583, 49863, 8897, 1682, 17667, 9235, 3703, 14171, 10359, 1660, 1450, 18894, 2088, 32427, 2160, 9252, 9389, 1642, 85269, 10297, 1584, 9525, 14124, 4469, 8990, 2100, 9288, 64698, 10480, 20893, 33230, 1586, 9943, 16334, 68862, 9011, 14031, 6178, 21225, 1420, 32236, 2099, 2150, 26583, 2784, 8941, 9811, 27444, 50566 or 66428 fusion protein in which the 140, 1470, 1686, 2089, 2427, 3702, 5891, 6428, 7181, 7660, 25641, 69583, 49863, 8897, 1682, 17667, 9235, 3703, 14171, 10359, 1660, 1450, 18894, 2088, 32427, 2160, 9252, 9389, 1642, 85269, 10297, 1584, 9525, 14124, 4469, 8990, 2100, 9288, 64698, 10480, 20893, 33230, 1586, 9943, 16334, 68862, 9011, 14031, 6178, 21225, 1420, 32236, 2099, 2150, 26583, 2784, 8941, 9811, 27444, 50566 or 66428 sequences are fused to the C-terminus of the GST sequences. Such fusion proteins can facilitate the purification of recombinant 140, 1470, 1686, 2089, 2427, 3702, 5891, 6428, 7181, 7660, 25641, 69583, 49863, 8897, 1682, 17667, 9235, 3703, 14171, 10359, 1660, 1450, 18894, 2088, 32427, 2160, 9252, 9389, 1642, 85269, 10297, 1584, 9525, 14124, 4469, 8990, 2100, 9288, 64698, 10480, 20893, 33230, 1586, 9943, 16334, 68862, 9011, 14031, 6178, 21225, 1420, 32236, 2099, 2150, 26583, 2784, 8941, 9811, 27444, 50566 or 66428.

[0711] In another embodiment, this fusion protein is a 140, 1470, 1686, 2089, 2427, 3702, 5891, 6428, 7181, 7660, 25641, 69583, 49863, 8897, 1682, 17667, 9235, 3703, 14171, 10359, 1660, 1450, 18894, 2088, 32427, 2160, 9252, 9389, 1642, 85269, 10297, 1584, 9525, 14124, 4469, 8990, 2100, 9288, 64698, 10480, 20893, 33230, 1586, 9943, 16334, 68862, 9011, 14031, 6178, 21225, 1420, 32236, 2099, 2150, 26583, 2784, 8941, 9811, 27444, 50566 or 66428 protein containing a heterologous signal sequence at its N-terminus. In certain host cells (e.g., mammalian host cells), expression and/or secretion of 140, 1470, 1686, 2089, 2427, 3702, 5891, 6428, 7181, 7660, 25641, 69583, 49863, 8897, 1682, 17667, 9235, 3703, 14171, 10359, 1660, 1450, 18894, 2088, 32427, 2160, 9252, 9389, 1642, 85269, 10297, 1584, 9525, 14124, 4469, 8990, 2100, 9288, 64698, 10480, 20893, 33230, 1586, 9943, 16334, 68862, 9011, 14031, 6178, 21225, 1420, 32236, 2099, 2150, 26583, 2784, 8941, 9811, 27444, 50566 or 66428 can be increased through use of a heterologous signal sequence.

[0712] The 140, 1470, 1686, 2089, 2427, 3702, 5891, 6428, 7181, 7660, 25641, 69583, 49863, 8897, 1682, 17667, 9235, 3703, 14171, 10359, 1660, 1450, 18894, 2088, 32427, 2160, 9252, 9389, 1642, 85269, 10297, 1584, 9525, 14124, 4469, 8990, 2100, 9288, 64698, 10480, 20893, 33230, 1586, 9943, 16334, 68862, 9011, 14031, 6178, 21225, 1420, 32236, 2099, 2150, 26583, 2784, 8941, 9811, 27444, 50566 or 66428 fusion proteins used in the methods of the invention can be incorporated into pharmaceutical compositions and administered to a subject in vivo. The 140, 1470, 1686, 2089, 2427, 3702, 5891, 6428, 7181, 7660, 25641, 69583, 49863, 8897, 1682, 17667, 9235, 3703, 14171, 10359, 1660, 1450, 18894, 2088, 32427, 2160, 9252, 9389, 1642, 85269, 10297, 1584, 9525, 14124, 4469, 8990, 2100, 9288, 64698, 10480, 20893, 33230, 1586, 9943, 16334, 68862, 9011, 14031, 6178, 21225, 1420, 32236, 2099, 2150, 26583, 2784, 8941, 9811, 27444, 50566 or 66428 fusion proteins can be used to affect the bioavailability of a 140, 1470, 1686, 2089, 2427, 3702, 5891, 6428, 7181, 7660, 25641, 69583, 49863, 8897, 1682, 17667, 9235, 3703, 14171, 10359, 1660, 1450, 18894, 2088, 32427, 2160, 9252, 9389, 1642, 85269, 10297, 1584, 9525, 14124, 4469, 8990, 2100, 9288, 64698, 10480, 20893, 33230, 1586, 9943, 16334, 68862, 9011, 14031, 6178, 21225, 1420, 32236, 2099, 2150, 26583, 2784, 8941, 9811, 27444, 50566 or 66428 substrate. Use of 140, 1470, 1686, 2089, 2427, 3702, 5891, 6428, 7181, 7660, 25641, 69583, 49863, 8897, 1682, 17667, 9235, 3703, 14171, 10359, 1660, 1450, 18894, 2088, 32427, 2160, 9252, 9389, 1642, 85269, 10297, 1584, 9525, 14124, 4469, 8990, 2100, 9288, 64698, 10480, 20893, 33230, 1586, 9943, 16334, 68862, 9011, 14031, 6178, 21225, 1420, 32236, 2099, 2150, 26583, 2784, 8941, 9811, 27444, 50566 or 66428 fusion proteins may be useful therapeutically for the treatment of disorders caused by, for example, (i) aberrant modification or mutation of a gene encoding a 140, 1470, 1686, 2089, 2427, 3702, 5891, 6428, 7181, 7660, 25641, 69583, 49863, 8897, 1682, 17667, 9235, 3703, 14171, 10359, 1660, 1450, 18894, 2088, 32427, 2160, 9252, 9389, 1642, 85269, 10297, 1584, 9525, 14124, 4469, 8990, 2100, 9288, 64698, 10480, 20893, 33230, 1586, 9943, 16334, 68862, 9011, 14031, 6178, 21225, 1420, 32236, 2099, 2150, 26583, 2784, 8941, 9811, 27444, 50566 or 66428 protein; (ii) mis-regulation of the 140, 1470, 1686, 2089, 2427, 3702, 5891, 6428, 7181, 7660, 25641, 69583, 49863, 8897, 1682, 17667, 9235, 3703, 14171, 10359, 1660, 1450, 18894, 2088, 32427, 2160, 9252, 9389, 1642, 85269, 10297, 1584, 9525, 14124, 4469, 8990, 2100, 9288, 64698, 10480, 20893, 33230, 1586, 9943, 16334, 68862, 9011, 14031, 6178, 21225, 1420, 32236, 2099, 2150, 26583, 2784, 8941, 9811, 27444, 50566 or 66428 gene; and (iii) aberrant post-translational modification of a 140, 1470, 1686, 2089, 2427, 3702, 5891, 6428, 7181, 7660, 25641, 69583, 49863, 8897, 1682, 17667, 9235, 3703, 14171, 10359, 1660, 1450, 18894, 2088, 32427, 2160, 9252, 9389, 1642, 85269, 10297, 1584, 9525, 14124, 4469, 8990, 2100, 9288, 64698, 10480, 20893, 33230, 1586, 9943, 16334, 68862, 9011, 14031, 6178, 21225, 1420, 32236, 2099, 2150, 26583, 2784, 8941, 9811, 27444, 50566 or 66428 protein.

[0713] Moreover, the 140, 1470, 1686, 2089, 2427, 3702, 5891, 6428, 7181, 7660, 25641, 69583, 49863, 8897, 1682, 17667, 9235, 3703, 14171, 10359, 1660, 1450, 18894, 2088, 32427, 2160, 9252, 9389, 1642, 85269, 10297, 1584, 9525, 14124, 4469, 8990, 2100, 9288, 64698, 10480, 20893, 33230, 1586, 9943, 16334, 68862, 9011, 14031, 6178, 21225, 1420, 32236, 2099, 2150, 26583, 2784, 8941, 9811, 27444, 50566 or 66428-fusion proteins used in the methods of the invention can be used as immunogens to produce anti-140, 1470, 1686, 2089, 2427, 3702, 5891, 6428, 7181, 7660, 25641, 69583, 49863, 8897, 1682, 17667, 9235, 3703, 14171, 10359, 1660, 1450, 18894, 2088, 32427, 2160, 9252, 9389, 1642, 85269, 10297, 1584, 9525, 14124, 4469, 8990, 2100, 9288, 64698, 10480, 20893, 33230, 1586, 9943, 16334, 68862, 9011, 14031, 6178, 21225, 1420, 32236, 2099, 2150, 26583, 2784, 8941, 9811, 27444, 50566 or 66428 antibodies in a subject, to purify 140, 1470, 1686, 2089, 2427, 3702, 5891, 6428, 7181, 7660, 25641, 69583, 49863, 8897, 1682, 17667, 9235, 3703, 14171, 10359, 1660, 1450, 18894, 2088, 32427, 2160, 9252, 9389, 1642, 85269, 10297, 1584, 9525, 14124, 4469, 8990, 2100, 9288, 64698, 10480, 20893, 33230, 1586, 9943, 16334, 68862, 9011, 14031, 6178, 21225, 1420, 32236, 2099, 2150, 26583, 2784, 8941, 9811, 27444, 50566 or 66428 ligands and in screening assays to identify molecules which inhibit the interaction of 140, 1470, 1686, 2089, 2427, 3702, 5891, 6428, 7181, 7660, 25641, 69583, 49863, 8897, 1682, 17667, 9235, 3703, 14171, 10359, 1660, 1450, 18894, 2088, 32427, 2160, 9252, 9389, 1642, 85269, 10297, 1584, 9525, 14124, 4469, 8990, 2100, 9288, 64698, 10480, 20893, 33230, 1586, 9943, 16334, 68862, 9011, 14031, 6178, 21225, 1420, 32236, 2099, 2150, 26583, 2784, 8941, 9811, 27444, 50566 or 66428 with a 140, 1470, 1686, 2089, 2427, 3702, 5891, 6428, 7181, 7660, 25641, 69583, 49863, 8897, 1682, 17667, 9235, 3703, 14171, 10359, 1660, 1450, 18894, 2088, 32427, 2160, 9252, 9389, 1642, 85269, 10297, 1584, 9525, 14124, 4469, 8990, 2100, 9288, 64698, 10480, 20893, 33230, 1586, 9943, 16334, 68862, 9011, 14031, 6178, 21225, 1420, 32236, 2099, 2150, 26583, 2784, 8941, 9811, 27444, 50566 or 66428 substrate.

[0714] Preferably, a 140, 1470, 1686, 2089, 2427, 3702, 5891, 6428, 7181, 7660, 25641, 69583, 49863, 8897, 1682, 17667, 9235, 3703, 14171, 10359, 1660, 1450, 18894, 2088, 32427, 2160, 9252, 9389, 1642, 85269, 10297, 1584, 9525, 14124, 4469, 8990, 2100, 9288, 64698, 10480, 20893, 33230, 1586, 9943, 16334, 68862, 9011, 14031, 6178, 21225, 1420, 32236, 2099, 2150, 26583, 2784, 8941, 9811, 27444, 50566 or 66428 chimeric or fusion protein used in the methods of the invention is produced by standard recombinant DNA techniques. For example, DNA fragments coding for the different polypeptide sequences are ligated together in-frame in accordance with conventional techniques, for example by employing blunt-ended or stagger-ended termini for ligation, restriction enzyme digestion to provide for appropriate termini, filling-in of cohesive ends as appropriate, alkaline phosphatase treatment to avoid undesirable joining, and enzymatic ligation. In another embodiment, the fusion gene can be synthesized by conventional techniques including automated DNA synthesizers. Alternatively, PCR amplification of gene fragments can be carried out using anchor primers which give rise to complementary overhangs between two consecutive gene fragments which can subsequently be annealed and reamplified to generate a chimeric gene sequence (see, for example, Current Protocols in Molecular Biology, eds. Ausubel et al. John Wiley & Sons: 1992). Moreover, many expression vectors are commercially available that already encode a fusion moiety (e.g., a GST polypeptide). A 140, 1470, 1686, 2089, 2427, 3702, 5891, 6428, 7181, 7660, 25641, 69583, 49863, 8897, 1682, 17667, 9235, 3703, 14171, 10359, 1660, 1450, 18894, 2088, 32427, 2160, 9252, 9389, 1642, 85269, 10297, 1584, 9525, 14124, 4469, 8990, 2100, 9288, 64698, 10480, 20893, 33230, 1586, 9943, 16334, 68862, 9011, 14031, 6178, 21225, 1420, 32236, 2099, 2150, 26583, 2784, 8941, 9811, 27444, 50566 or 66428-encoding nucleic acid can be cloned into such an expression vector such that the fusion moiety is linked in-frame to the 140, 1470, 1686, 2089, 2427, 3702, 5891, 6428, 7181, 7660, 25641, 69583, 49863, 8897, 1682, 17667, 9235, 3703, 14171, 10359, 1660, 1450, 18894, 2088, 32427, 2160, 9252, 9389, 1642, 85269, 10297, 1584, 9525, 14124, 4469, 8990, 2100, 9288, 64698, 10480, 20893, 33230, 1586, 9943, 16334, 68862, 9011, 14031, 6178, 21225, 1420, 32236, 2099, 2150, 26583, 2784, 8941, 9811, 27444, 50566 or 66428 protein.

[0715] The present invention also pertains to the use of variants of the 140, 1470, 1686, 2089, 2427, 3702, 5891, 6428, 7181, 7660, 25641, 69583, 49863, 8897, 1682, 17667, 9235, 3703, 14171, 10359, 1660, 1450, 18894, 2088, 32427, 2160, 9252, 9389, 1642, 85269, 10297, 1584, 9525, 14124, 4469, 8990, 2100, 9288, 64698, 10480, 20893, 33230, 1586, 9943, 16334, 68862, 9011, 14031, 6178, 21225, 1420, 32236, 2099, 2150, 26583, 2784, 8941, 9811, 27444, 50566 or 66428 proteins which function as either 140, 1470, 1686, 2089, 2427, 3702, 5891, 6428, 7181, 7660, 25641, 69583, 49863, 8897, 1682, 17667, 9235, 3703, 14171, 10359, 1660, 1450, 18894, 2088, 32427, 2160, 9252, 9389, 1642, 85269, 10297, 1584, 9525, 14124, 4469, 8990, 2100, 9288, 64698, 10480, 20893, 33230, 1586, 9943, 16334, 68862, 9011, 14031, 6178, 21225, 1420, 32236, 2099, 2150, 26583, 2784, 8941, 9811, 27444, 50566 or 66428 agonists (mimetics) or as 140, 1470, 1686, 2089, 2427, 3702, 5891, 6428, 7181, 7660, 25641, 69583, 49863, 8897, 1682, 17667, 9235, 3703, 14171, 10359, 1660, 1450, 18894, 2088, 32427, 2160, 9252, 9389, 1642, 85269, 10297, 1584, 9525, 14124, 4469, 8990, 2100, 9288, 64698, 10480, 20893, 33230, 1586, 9943, 16334, 68862, 9011, 14031, 6178, 21225, 1420, 32236, 2099, 2150, 26583, 2784, 8941, 9811, 27444, 50566 or 66428 antagonists. Variants of the 140, 1470, 1686, 2089, 2427, 3702, 5891, 6428, 7181, 7660, 25641, 69583, 49863, 8897, 1682, 17667, 9235, 3703, 14171, 10359, 1660, 1450, 18894, 2088, 32427, 2160, 9252, 9389, 1642, 85269, 10297, 1584, 9525, 14124, 4469, 8990, 2100, 9288, 64698, 10480, 20893, 33230, 1586, 9943, 16334, 68862, 9011, 14031, 6178, 21225, 1420, 32236, 2099, 2150, 26583, 2784, 8941, 9811, 27444, 50566 or 66428 proteins can be generated by mutagenesis, e.g., discrete point mutation or truncation of a 140, 1470, 1686, 2089, 2427, 3702, 5891, 6428, 7181, 7660, 25641, 69583, 49863, 8897, 1682, 17667, 9235, 3703, 14171, 10359, 1660, 1450, 18894, 2088, 32427, 2160, 9252, 9389, 1642, 85269, 10297, 1584, 9525, 14124, 4469, 8990, 2100, 9288, 64698, 10480, 20893, 33230, 1586, 9943, 16334, 68862, 9011, 14031, 6178, 21225, 1420, 32236, 2099, 2150, 26583, 2784, 8941, 9811, 27444, 50566 or 66428 protein. An agonist of the 140, 1470, 1686, 2089, 2427, 3702, 5891, 6428, 7181, 7660, 25641, 69583, 49863, 8897, 1682, 17667, 9235, 3703, 14171, 10359, 1660, 1450, 18894, 2088, 32427, 2160, 9252, 9389, 1642, 85269, 10297, 1584, 9525, 14124, 4469, 8990, 2100, 9288, 64698, 10480, 20893, 33230, 1586, 9943, 16334, 68862, 9011, 14031, 6178, 21225, 1420, 32236, 2099, 2150, 26583, 2784, 8941, 9811, 27444, 50566 or 66428 proteins can retain substantially the same, or a subset, of the biological activities of the naturally occurring form of a 140, 1470, 1686, 2089, 2427, 3702, 5891, 6428, 7181, 7660, 25641, 69583, 49863, 8897, 1682, 17667, 9235, 3703, 14171, 10359, 1660, 1450, 18894, 2088, 32427, 2160, 9252, 9389, 1642, 85269, 10297, 1584, 9525, 14124, 4469, 8990, 2100, 9288, 64698, 10480, 20893, 33230, 1586, 9943, 16334, 68862, 9011, 14031, 6178, 21225, 1420, 32236, 2099, 2150, 26583, 2784, 8941, 9811, 27444, 50566 or 66428 protein. An antagonist of a 140, 1470, 1686, 2089, 2427, 3702, 5891, 6428, 7181, 7660, 25641, 69583, 49863, 8897, 1682, 17667, 9235, 3703, 14171, 10359, 1660, 1450, 18894, 2088, 32427, 2160, 9252, 9389, 1642, 85269, 10297, 1584, 9525, 14124, 4469, 8990, 2100, 9288, 64698, 10480, 20893, 33230, 1586, 9943, 16334, 68862, 9011, 14031, 6178, 21225, 1420, 32236, 2099, 2150, 26583, 2784, 8941, 9811, 27444, 50566 or 66428 protein can inhibit one or more of the activities of the naturally occurring form of the 140, 1470, 1686, 2089, 2427, 3702, 5891, 6428, 7181, 7660, 25641, 69583, 49863, 8897, 1682, 17667, 9235, 3703, 14171, 10359, 1660, 1450, 18894, 2088, 32427, 2160, 9252, 9389, 1642, 85269, 10297, 1584, 9525, 14124, 4469, 8990, 2100, 9288, 64698, 10480, 20893, 33230, 1586, 9943, 16334, 68862, 9011, 14031, 6178, 21225, 1420, 32236, 2099, 2150, 26583, 2784, 8941, 9811, 27444, 50566 or 66428 protein by, for example, competitively modulating a 140, 1470, 1686, 2089, 2427, 3702, 5891, 6428, 7181, 7660, 25641, 69583, 49863, 8897, 1682, 17667, 9235, 3703, 14171, 10359, 1660, 1450, 18894, 2088, 32427, 2160, 9252, 9389, 1642, 85269, 10297, 1584, 9525, 14124, 4469, 8990, 2100, 9288, 64698, 10480, 20893, 33230, 1586, 9943, 16334, 68862, 9011, 14031, 6178, 21225, 1420, 32236, 2099, 2150, 26583, 2784, 8941, 9811, 27444, 50566 or 66428-mediated activity of a 140, 1470, 1686, 2089, 2427, 3702, 5891, 6428, 7181, 7660, 25641, 69583, 49863, 8897, 1682, 17667, 9235, 3703, 14171, 10359, 1660, 1450, 18894, 2088, 32427, 2160, 9252, 9389, 1642, 85269, 10297, 1584, 9525, 14124, 4469, 8990, 2100, 9288, 64698, 10480, 20893, 33230, 1586, 9943, 16334, 68862, 9011, 14031, 6178, 21225, 1420, 32236, 2099, 2150, 26583, 2784, 8941, 9811, 27444, 50566 or 66428 protein. Thus, specific biological effects can be elicited by treatment with a variant of limited function. In one embodiment, treatment of a subject with a variant having a subset of the biological activities of the naturally occurring form of the protein has fewer side effects in a subject relative to treatment with the naturally occurring form of the 140, 1470, 1686, 2089, 2427, 3702, 5891, 6428, 7181, 7660, 25641, 69583, 49863, 8897, 1682, 17667, 9235, 3703, 14171, 10359, 1660, 1450, 18894, 2088, 32427, 2160, 9252, 9389, 1642, 85269, 10297, 1584, 9525, 14124, 4469, 8990, 2100, 9288, 64698, 10480, 20893, 33230, 1586, 9943, 16334, 68862, 9011, 14031, 6178, 21225, 1420, 32236, 2099, 2150, 26583, 2784, 8941, 9811, 27444, 50566 or 66428 protein.

[0716] In one embodiment, variants of a 140, 1470, 1686, 2089, 2427, 3702, 5891, 6428, 7181, 7660, 25641, 69583, 49863, 8897, 1682, 17667, 9235, 3703, 14171, 10359, 1660, 1450, 18894, 2088, 32427, 2160, 9252, 9389, 1642, 85269, 10297, 1584, 9525, 14124, 4469, 8990, 2100, 9288, 64698, 10480, 20893, 33230, 1586, 9943, 16334, 68862, 9011, 14031, 6178, 21225, 1420, 32236, 2099, 2150, 26583, 2784, 8941, 9811, 27444, 50566 or 66428 protein which function as either 140, 1470, 1686, 2089, 2427, 3702, 5891, 6428, 7181, 7660, 25641, 69583, 49863, 8897, 1682, 17667, 9235, 3703, 14171, 10359, 1660, 1450, 18894, 2088, 32427, 2160, 9252, 9389, 1642, 85269, 10297, 1584, 9525, 14124, 4469, 8990, 2100, 9288, 64698, 10480, 20893, 33230, 1586, 9943, 16334, 68862, 9011, 14031, 6178, 21225, 1420, 32236, 2099, 2150, 26583, 2784, 8941, 9811, 27444, 50566 or 66428 agonists (mimetics) or as 140, 1470, 1686, 2089, 2427, 3702, 5891, 6428, 7181, 7660, 25641, 69583, 49863, 8897, 1682, 17667, 9235, 3703, 14171, 10359, 1660, 1450, 18894, 2088, 32427, 2160, 9252, 9389, 1642, 85269, 10297, 1584, 9525, 14124, 4469, 8990, 2100, 9288, 64698, 10480, 20893, 33230, 1586, 9943, 16334, 68862, 9011, 14031, 6178, 21225, 1420, 32236, 2099, 2150, 26583, 2784, 8941, 9811, 27444, 50566 or 66428 antagonists can be identified by screening combinatorial libraries of mutants, e.g., truncation mutants, of a 140, 1470, 1686, 2089, 2427, 3702, 5891, 6428, 7181, 7660, 25641, 69583, 49863, 8897, 1682, 17667, 9235, 3703, 14171, 10359, 1660, 1450, 18894, 2088, 32427, 2160, 9252, 9389, 1642, 85269, 10297, 1584, 9525, 14124, 4469, 8990, 2100, 9288, 64698, 10480, 20893, 33230, 1586, 9943, 16334, 68862, 9011, 14031, 6178, 21225, 1420, 32236, 2099, 2150, 26583, 2784, 8941, 9811, 27444, 50566 or 66428 protein for 140, 1470, 1686, 2089, 2427, 3702, 5891, 6428, 7181, 7660, 25641, 69583, 49863, 8897, 1682, 17667, 9235, 3703, 14171, 10359, 1660, 1450, 18894, 2088, 32427, 2160, 9252, 9389, 1642, 85269, 10297, 1584, 9525, 14124, 4469, 8990, 2100, 9288, 64698, 10480, 20893, 33230, 1586, 9943, 16334, 68862, 9011, 14031, 6178, 21225, 1420, 32236, 2099, 2150, 26583, 2784, 8941, 9811, 27444, 50566 or 66428 protein agonist or antagonist activity. In one embodiment, a variegated library of 140, 1470, 1686, 2089, 2427, 3702, 5891, 6428, 7181, 7660, 25641, 69583, 49863, 8897, 1682, 17667, 9235, 3703, 14171, 10359, 1660, 1450, 18894, 2088, 32427, 2160, 9252, 9389, 1642, 85269, 10297, 1584, 9525, 14124, 4469, 8990, 2100, 9288, 64698, 10480, 20893, 33230, 1586, 9943, 16334, 68862, 9011, 14031, 6178, 21225, 1420, 32236, 2099, 2150, 26583, 2784, 8941, 9811, 27444, 50566 or 66428 variants is generated by combinatorial mutagenesis at the nucleic acid level and is encoded by a variegated gene library. A variegated library of 140, 1470, 1686, 2089, 2427, 3702, 5891, 6428, 7181, 7660, 25641, 69583, 49863, 8897, 1682, 17667, 9235, 3703, 14171, 10359, 1660, 1450, 18894, 2088, 32427, 2160, 9252, 9389, 1642, 85269, 10297, 1584, 9525, 14124, 4469, 8990, 2100, 9288, 64698, 10480, 20893, 33230, 1586, 9943, 16334, 68862, 9011, 14031, 6178, 21225, 1420, 32236, 2099, 2150, 26583, 2784, 8941, 9811, 27444, 50566 or 66428 variants can be produced by, for example, enzymatically ligating a mixture of synthetic oligonucleotides into gene sequences such that a degenerate set of potential 140, 1470, 1686, 2089, 2427, 3702, 5891, 6428, 7181, 7660, 25641, 69583, 49863, 8897, 1682, 17667, 9235, 3703, 14171, 10359, 1660, 1450, 18894, 2088, 32427, 2160, 9252, 9389, 1642, 85269, 10297, 1584, 9525, 14124, 4469, 8990, 2100, 9288, 64698, 10480, 20893, 33230, 1586, 9943, 16334, 68862, 9011, 14031, 6178, 21225, 1420, 32236, 2099, 2150, 26583, 2784, 8941, 9811, 27444, 50566 or 66428 sequences is expressible as individual polypeptides, or alternatively, as a set of larger fusion proteins (e.g., for phage display) containing the set of 140, 1470, 1686, 2089, 2427, 3702, 5891, 6428, 7181, 7660, 25641, 69583, 49863, 8897, 1682, 17667, 9235, 3703, 14171, 10359, 1660, 1450, 18894, 2088, 32427, 2160, 9252, 9389, 1642, 85269, 10297, 1584, 9525, 14124, 4469, 8990, 2100, 9288, 64698, 10480, 20893, 33230, 1586, 9943, 16334, 68862, 9011, 14031, 6178, 21225, 1420, 32236, 2099, 2150, 26583, 2784, 8941, 9811, 27444, 50566 or 66428 sequences therein. There are a variety of methods which can be used to produce libraries of potential 140, 1470, 1686, 2089, 2427, 3702, 5891, 6428, 7181, 7660, 25641, 69583, 49863, 8897, 1682, 17667, 9235, 3703, 14171, 10359, 1660, 1450, 18894, 2088, 32427, 2160, 9252, 9389, 1642, 85269, 10297, 1584, 9525, 14124, 4469, 8990, 2100, 9288, 64698, 10480, 20893, 33230, 1586, 9943, 16334, 68862, 9011, 14031, 6178, 21225, 1420, 32236, 2099, 2150, 26583, 2784, 8941, 9811, 27444, 50566 or 66428 variants from a degenerate oligonucleotide sequence. Chemical synthesis of a degenerate gene sequence can be performed in an automatic DNA synthesizer, and the synthetic gene then ligated into an appropriate expression vector. Use of a degenerate set of genes allows for the provision, in one mixture, of all of the sequences encoding the desired set of potential 140, 1470, 1686, 2089, 2427, 3702, 5891, 6428, 7181, 7660, 25641, 69583, 49863, 8897, 1682, 17667, 9235, 3703, 14171, 10359, 1660, 1450, 18894, 2088, 32427, 2160, 9252, 9389, 1642, 85269, 10297, 1584, 9525, 14124, 4469, 8990, 2100, 9288, 64698, 10480, 20893, 33230, 1586, 9943, 16334, 68862, 9011, 14031, 6178, 21225, 1420, 32236, 2099, 2150, 26583, 2784, 8941, 9811, 27444, 50566 or 66428 sequences. Methods for synthesizing degenerate oligonucleotides are known in the art (see, e.g., Narang, S. A. (1983) Tetrahedron 39:3; Itakura et al. (1984) Annu. Rev. Biochem. 53:323; Itakura et al. (1984) Science 198:1056; Ike et al. (1983) Nucleic Acid Res. 11:477).

[0717] In addition, libraries of fragments of a 140, 1470, 1686, 2089, 2427, 3702, 5891, 6428, 7181, 7660, 25641, 69583, 49863, 8897, 1682, 17667, 9235, 3703, 14171, 10359, 1660, 1450, 18894, 2088, 32427, 2160, 9252, 9389, 1642, 85269, 10297, 1584, 9525, 14124, 4469, 8990, 2100, 9288, 64698, 10480, 20893, 33230, 1586, 9943, 16334, 68862, 9011, 14031, 6178, 21225, 1420, 32236, 2099, 2150, 26583, 2784, 8941, 9811, 27444, 50566 or 66428 protein coding sequence can be used to generate a variegated population of 140, 1470, 1686, 2089, 2427, 3702, 5891, 6428, 7181, 7660, 25641, 69583, 49863, 8897, 1682, 17667, 9235, 3703, 14171, 10359, 1660, 1450, 18894, 2088, 32427, 2160, 9252, 9389, 1642, 85269, 10297, 1584, 9525, 14124, 4469, 8990, 2100, 9288, 64698, 10480, 20893, 33230, 1586, 9943, 16334, 68862, 9011, 14031, 6178, 21225, 1420, 32236, 2099, 2150, 26583, 2784, 8941, 9811, 27444, 50566 or 66428 fragments for screening and subsequent selection of variants of a 140, 1470, 1686, 2089, 2427, 3702, 5891, 6428, 7181, 7660, 25641, 69583, 49863, 8897, 1682, 17667, 9235, 3703, 14171, 10359, 1660, 1450, 18894, 2088, 32427, 2160, 9252, 9389, 1642, 85269, 10297, 1584, 9525, 14124, 4469, 8990, 2100, 9288, 64698, 10480, 20893, 33230, 1586, 9943, 16334, 68862, 9011, 14031, 6178, 21225, 1420, 32236, 2099, 2150, 26583, 2784, 8941, 9811, 27444, 50566 or 66428 protein. In one embodiment, a library of coding sequence fragments can be generated by treating a double stranded PCR fragment of a 140, 1470, 1686, 2089, 2427, 3702, 5891, 6428, 7181, 7660, 25641, 69583, 49863, 8897, 1682, 17667, 9235, 3703, 14171, 10359, 1660, 1450, 18894, 2088, 32427, 2160, 9252, 9389, 1642, 85269, 10297, 1584, 9525, 14124, 4469, 8990, 2100, 9288, 64698, 10480, 20893, 33230, 1586, 9943, 16334, 68862, 9011, 14031, 6178, 21225, 1420, 32236, 2099, 2150, 26583, 2784, 8941, 9811, 27444, 50566 or 66428 coding sequence with a nuclease under conditions wherein nicking occurs only about once per molecule, denaturing the double stranded DNA, renaturing the DNA to form double stranded DNA which can include sense/antisense pairs from different nicked products, removing single stranded portions from reformed duplexes by treatment with S1 nuclease, and ligating the resulting fragment library into an expression vector. By this method, an expression library can be derived which encodes N-terminal, C-terminal and internal fragments of various sizes of the 140, 1470, 1686, 2089, 2427, 3702, 5891, 6428, 7181, 7660, 25641, 69583, 49863, 8897, 1682, 17667, 9235, 3703, 14171, 10359, 1660, 1450, 18894, 2088, 32427, 2160, 9252, 9389, 1642, 85269, 10297, 1584, 9525, 14124, 4469, 8990, 2100, 9288, 64698, 10480, 20893, 33230, 1586, 9943, 16334, 68862, 9011, 14031, 6178, 21225, 1420, 32236, 2099, 2150, 26583, 2784, 8941, 9811, 27444, 50566 or 66428 protein.

[0718] Several techniques are known in the art for screening gene products of combinatorial libraries made by point mutations or truncation, and for screening cDNA libraries for gene products having a selected property. Such techniques are adaptable for rapid screening of the gene libraries generated by the combinatorial mutagenesis of 140, 1470, 1686, 2089, 2427, 3702, 5891, 6428, 7181, 7660, 25641, 69583, 49863, 8897, 1682, 17667, 9235, 3703, 14171, 10359, 1660, 1450, 18894, 2088, 32427, 2160, 9252, 9389, 1642, 85269, 10297, 1584, 9525, 14124, 4469, 8990, 2100, 9288, 64698, 10480, 20893, 33230, 1586, 9943, 16334, 68862, 9011, 14031, 6178, 21225, 1420, 32236, 2099, 2150, 26583, 2784, 8941, 9811, 27444, 50566 or 66428 proteins. The most widely used techniques, which are amenable to high through-put analysis, for screening large gene libraries typically include cloning the gene library into replicable expression vectors, transforming appropriate cells with the resulting library of vectors, and expressing the combinatorial genes under conditions in which detection of a desired activity facilitates isolation of the vector encoding the gene whose product was detected. Recursive ensemble mutagenesis (REM), a new technique which enhances the frequency of functional mutants in the libraries, can be used in combination with the screening assays to identify 140, 1470, 1686, 2089, 2427, 3702, 5891, 6428, 7181, 7660, 25641, 69583, 49863, 8897, 1682, 17667, 9235, 3703, 14171, 10359, 1660, 1450, 18894, 2088, 32427, 2160, 9252, 9389, 1642, 85269, 10297, 1584, 9525, 14124, 4469, 8990, 2100, 9288, 64698, 10480, 20893, 33230, 1586, 9943, 16334, 68862, 9011, 14031, 6178, 21225, 1420, 32236, 2099, 2150, 26583, 2784, 8941, 9811, 27444, 50566 or 66428 variants (Arkin and Yourvan (1992) Proc. Natl. Acad. Sci. USA 89:7811-7815; Delgrave et al. (1993) Protein Engineering 6(3):327-331).

[0719] The methods of the present invention further include the use of anti-140, 1470, 1686, 2089, 2427, 3702, 5891, 6428, 7181, 7660, 25641, 69583, 49863, 8897, 1682, 17667, 9235, 3703, 14171, 10359, 1660, 1450, 18894, 2088, 32427, 2160, 9252, 9389, 1642, 85269, 10297, 1584, 9525, 14124, 4469, 8990, 2100, 9288, 64698, 10480, 20893, 33230, 1586, 9943, 16334, 68862, 9011, 14031, 6178, 21225, 1420, 32236, 2099, 2150, 26583, 2784, 8941, 9811, 27444, 50566 or 66428 antibodies. An isolated 140, 1470, 1686, 2089, 2427, 3702, 5891, 6428, 7181, 7660, 25641, 69583, 49863, 8897, 1682, 17667, 9235, 3703, 14171, 10359, 1660, 1450, 18894, 2088, 32427, 2160, 9252, 9389, 1642, 85269, 10297, 1584, 9525, 14124, 4469, 8990, 2100, 9288, 64698, 10480, 20893, 33230, 1586, 9943, 16334, 68862, 9011, 14031, 6178, 21225, 1420, 32236, 2099, 2150, 26583, 2784, 8941, 9811, 27444, 50566 or 66428 protein, or a portion or fragment thereof, can be used as an immunogen to generate antibodies that bind 140, 1470, 1686, 2089, 2427, 3702, 5891, 6428, 7181, 7660, 25641, 69583, 49863, 8897, 1682, 17667, 9235, 3703, 14171, 10359, 1660, 1450, 18894, 2088, 32427, 2160, 9252, 9389, 1642, 85269, 10297, 1584, 9525, 14124, 4469, 8990, 2100, 9288, 64698, 10480, 20893, 33230, 1586, 9943, 16334, 68862, 9011, 14031, 6178, 21225, 1420, 32236, 2099, 2150, 26583, 2784, 8941, 9811, 27444, 50566 or 66428 using standard techniques for polyclonal and monoclonal antibody preparation. A full-length 140, 1470, 1686, 2089, 2427, 3702, 5891, 6428, 7181, 7660, 25641, 69583, 49863, 8897, 1682, 17667, 9235, 3703, 14171, 10359, 1660, 1450, 18894, 2088, 32427, 2160, 9252, 9389, 1642, 85269, 10297, 1584, 9525, 14124, 4469, 8990, 2100, 9288, 64698, 10480, 20893, 33230, 1586, 9943, 16334, 68862, 9011, 14031, 6178, 21225, 1420, 32236, 2099, 2150, 26583, 2784, 8941, 9811, 27444, 50566 or 66428 protein can be used or, alternatively, antigenic peptide fragments of 140, 1470, 1686, 2089, 2427, 3702, 5891, 6428, 7181, 7660, 25641, 69583, 49863, 8897, 1682, 17667, 9235, 3703, 14171, 10359, 1660, 1450, 18894, 2088, 32427, 2160, 9252, 9389, 1642, 85269, 10297, 1584, 9525, 14124, 4469, 8990, 2100, 9288, 64698, 10480, 20893, 33230, 1586, 9943, 16334, 68862, 9011, 14031, 6178, 21225, 1420, 32236, 2099, 2150, 26583, 2784, 8941, 9811, 27444, 50566 or 66428 can be used as immunogens. The antigenic peptide of 140, 1470, 1686, 2089, 2427, 3702, 5891, 6428, 7181, 7660, 25641, 69583, 49863, 8897, 1682, 17667, 9235, 3703, 14171, 10359, 1660, 1450, 18894, 2088, 32427, 2160, 9252, 9389, 1642, 85269, 10297, 1584, 9525, 14124, 4469, 8990, 2100, 9288, 64698, 10480, 20893, 33230, 1586, 9943, 16334, 68862, 9011, 14031, 6178, 21225, 1420, 32236, 2099, 2150, 26583, 2784, 8941, 9811, 27444, 50566 or 66428 comprises at least 8 amino acid residues of the amino acid sequence shown in SEQ ID NO:2, 4, 6, 8, 10, 12, 14, 16, 18, 20, 22, 24, 26, 28, 30, 32, 34, 36, 38, 40, 42, 44, 46, 48, 50, 52, 54, 56, 58, 60, 62, 64, 66, 68, 70, 72, 74, 76, 78, 80, 82, 84, 86, 88, 90, 92, 94, 96, 98, 100, 102, 104, 106, 108, 110, 112, 114, 116, 118, 120 or 122 and encompasses an epitope of 140, 1470, 1686, 2089, 2427, 3702, 5891, 6428, 7181, 7660, 25641, 69583, 49863, 8897, 1682, 17667, 9235, 3703, 14171, 10359, 1660, 1450, 18894, 2088, 32427, 2160, 9252, 9389, 1642, 85269, 10297, 1584, 9525, 14124, 4469, 8990, 2100, 9288, 64698, 10480, 20893, 33230, 1586, 9943, 16334, 68862, 9011, 14031, 6178, 21225, 1420, 32236, 2099, 2150, 26583, 2784, 8941, 9811, 27444, 50566 or 66428 such that an antibody raised against the peptide forms a specific immune complex with the 140, 1470, 1686, 2089, 2427, 3702, 5891, 6428, 7181, 7660, 25641, 69583, 49863, 8897, 1682, 17667, 9235, 3703, 14171, 10359, 1660, 1450, 18894, 2088, 32427, 2160, 9252, 9389, 1642, 85269, 10297, 1584, 9525, 14124, 4469, 8990, 2100, 9288, 64698, 10480, 20893, 33230, 1586, 9943, 16334, 68862, 9011, 14031, 6178, 21225, 1420, 32236, 2099, 2150, 26583, 2784, 8941, 9811, 27444, 50566 or 66428 protein. Preferably, the antigenic peptide comprises at least 10 amino acid residues, more preferably at least 15 amino acid residues, even more preferably at least 20 amino acid residues, and most preferably at least 30 amino acid residues.

[0720] Preferred epitopes encompassed by the antigenic peptide are regions of 140, 1470, 1686, 2089, 2427, 3702, 5891, 6428, 7181, 7660, 25641, 69583, 49863, 8897, 1682, 17667, 9235, 3703, 14171, 10359, 1660, 1450, 18894, 2088, 32427, 2160, 9252, 9389, 1642, 85269, 10297, 1584, 9525, 14124, 4469, 8990, 2100, 9288, 64698, 10480, 20893, 33230, 1586, 9943, 16334, 68862, 9011, 14031, 6178, 21225, 1420, 32236, 2099, 2150, 26583, 2784, 8941, 9811, 27444, 50566 or 66428 that are located on the surface of the protein, e.g., hydrophilic regions, as well as regions with high antigenicity.

[0721] A 140, 1470, 1686, 2089, 2427, 3702, 5891, 6428, 7181, 7660, 25641, 69583, 49863, 8897, 1682, 17667, 9235, 3703, 14171, 10359, 1660, 1450, 18894, 2088, 32427, 2160, 9252, 9389, 1642, 85269, 10297, 1584, 9525, 14124, 4469, 8990, 2100, 9288, 64698, 10480, 20893, 33230, 1586, 9943, 16334, 68862, 9011, 14031, 6178, 21225, 1420, 32236, 2099, 2150, 26583, 2784, 8941, 9811, 27444, 50566 or 66428 immunogen is typically used to prepare antibodies by immunizing a suitable subject, (e.g., rabbit, goat, mouse, or other mammal) with the immunogen. An appropriate immunogenic preparation can contain, for example, recombinantly expressed 140, 1470, 1686, 2089, 2427, 3702, 5891, 6428, 7181, 7660, 25641, 69583, 49863, 8897, 1682, 17667, 9235, 3703, 14171, 10359, 1660, 1450, 18894, 2088, 32427, 2160, 9252, 9389, 1642, 85269, 10297, 1584, 9525, 14124, 4469, 8990, 2100, 9288, 64698, 10480, 20893, 33230, 1586, 9943, 16334, 68862, 9011, 14031, 6178, 21225, 1420, 32236, 2099, 2150, 26583, 2784, 8941, 9811, 27444, 50566 or 66428 protein or a chemically synthesized 140, 1470, 1686, 2089, 2427, 3702, 5891, 6428, 7181, 7660, 25641, 69583, 49863, 8897, 1682, 17667, 9235, 3703, 14171, 10359, 1660, 1450, 18894, 2088, 32427, 2160, 9252, 9389, 1642, 85269, 10297, 1584, 9525, 14124, 4469, 8990, 2100, 9288, 64698, 10480, 20893, 33230, 1586, 9943, 16334, 68862, 9011, 14031, 6178, 21225, 1420, 32236, 2099, 2150, 26583, 2784, 8941, 9811, 27444, 50566 or 66428 polypeptide. The preparation can further include an adjuvant, such as Freund's complete or incomplete adjuvant, or similar immunostimulatory agent. Immunization of a suitable subject with an immunogenic 140, 1470, 1686, 2089, 2427, 3702, 5891, 6428, 7181, 7660, 25641, 69583, 49863, 8897, 1682, 17667, 9235, 3703, 14171, 10359, 1660, 1450, 18894, 2088, 32427, 2160, 9252, 9389, 1642, 85269, 10297, 1584, 9525, 14124, 4469, 8990, 2100, 9288, 64698, 10480, 20893, 33230, 1586, 9943, 16334, 68862, 9011, 14031, 6178, 21225, 1420, 32236, 2099, 2150, 26583, 2784, 8941, 9811, 27444, 50566 or 66428 preparation induces a polyclonal anti-140, 1470, 1686, 2089, 2427, 3702, 5891, 6428, 7181, 7660, 25641, 69583, 49863, 8897, 1682, 17667, 9235, 3703, 14171, 10359, 1660, 1450, 18894, 2088, 32427, 2160, 9252, 9389, 1642, 85269, 10297, 1584, 9525, 14124, 4469, 8990, 2100, 9288, 64698, 10480, 20893, 33230, 1586, 9943, 16334, 68862, 9011, 14031, 6178, 21225, 1420, 32236, 2099, 2150, 26583, 2784, 8941, 9811, 27444, 50566 or 66428 antibody response.

[0722] The term “antibody” as used herein refers to immunoglobulin molecules and immunologically active portions of immunoglobulin molecules, i.e., molecules that contain an antigen binding site which specifically binds (immunoreacts with) an antigen, such as a 140, 1470, 1686, 2089, 2427, 3702, 5891, 6428, 7181, 7660, 25641, 69583, 49863, 8897, 1682, 17667, 9235, 3703, 14171, 10359, 1660, 1450, 18894, 2088, 32427, 2160, 9252, 9389, 1642, 85269, 10297, 1584, 9525, 14124, 4469, 8990, 2100, 9288, 64698, 10480, 20893, 33230, 1586, 9943, 16334, 68862, 9011, 14031, 6178, 21225, 1420, 32236, 2099, 2150, 26583, 2784, 8941, 9811, 27444, 50566 or 66428. Examples of immunologically active portions of immunoglobulin molecules include F(ab) and F(ab′)₂ fragments which can be generated by treating the antibody with an enzyme such as pepsin. The invention provides polyclonal and monoclonal antibodies that bind 140, 1470, 1686, 2089, 2427, 3702, 5891, 6428, 7181, 7660, 25641, 69583, 49863, 8897, 1682, 17667, 9235, 3703, 14171, 10359, 1660, 1450, 18894, 2088, 32427, 2160, 9252, 9389, 1642, 85269, 10297, 1584, 9525, 14124, 4469, 8990, 2100, 9288, 64698, 10480, 20893, 33230, 1586, 9943, 16334, 68862, 9011, 14031, 6178, 21225, 1420, 32236, 2099, 2150, 26583, 2784, 8941, 9811, 27444, 50566 or 66428 molecules. The term “monoclonal antibody” or “monoclonal antibody composition”, as used herein, refers to a population of antibody molecules that contain only one species of an antigen binding site capable of immunoreacting with a particular epitope of 2784, 8941, 9811, 27444, 50566 or 66428. A monoclonal antibody composition thus typically displays a single binding affinity for a particular 140, 1470, 1686, 2089, 2427, 3702, 5891, 6428, 7181, 7660, 25641, 69583, 49863, 8897, 1682, 17667, 9235, 3703, 14171, 10359, 1660, 1450, 18894, 2088, 32427, 2160, 9252, 9389, 1642, 85269, 10297, 1584, 9525, 14124, 4469, 8990, 2100, 9288, 64698, 10480, 20893, 33230, 1586, 9943, 16334, 68862, 9011, 14031, 6178, 21225, 1420, 32236, 2099, 2150, 26583, 2784, 8941, 9811, 27444, 50566 or 66428 protein with which it immunoreacts.

[0723] Polyclonal anti-140, 1470, 1686, 2089, 2427, 3702, 5891, 6428, 7181, 7660, 25641, 69583, 49863, 8897, 1682, 17667, 9235, 3703, 14171, 10359, 1660, 1450, 18894, 2088, 32427, 2160, 9252, 9389, 1642, 85269, 10297, 1584, 9525, 14124, 4469, 8990, 2100, 9288, 64698, 10480, 20893, 33230, 1586, 9943, 16334, 68862, 9011, 14031, 6178, 21225, 1420, 32236, 2099, 2150, 26583, 2784, 8941, 9811, 27444, 50566 or 66428 antibodies can be prepared as described above by immunizing a suitable subject with a 140, 1470, 1686, 2089, 2427, 3702, 5891, 6428, 7181, 7660, 25641, 69583, 49863, 8897, 1682, 17667, 9235, 3703, 14171, 10359, 1660, 1450, 18894, 2088, 32427, 2160, 9252, 9389, 1642, 85269, 10297, 1584, 9525, 14124, 4469, 8990, 2100, 9288, 64698, 10480, 20893, 33230, 1586, 9943, 16334, 68862, 9011, 14031, 6178, 21225, 1420, 32236, 2099, 2150, 26583, 2784, 8941, 9811, 27444, 50566 or 66428 immunogen. The anti-140, 1470, 1686, 2089, 2427, 3702, 5891, 6428, 7181, 7660, 25641, 69583, 49863, 8897, 1682, 17667, 9235, 3703, 14171, 10359, 1660, 1450, 18894, 2088, 32427, 2160, 9252, 9389, 1642, 85269, 10297, 1584, 9525, 14124, 4469, 8990, 2100, 9288, 64698, 10480, 20893, 33230, 1586, 9943, 16334, 68862, 9011, 14031, 6178, 21225, 1420, 32236, 2099, 2150, 26583, 2784, 8941, 9811, 27444, 50566 or 66428 antibody titer in the immunized subject can be monitored over time by standard techniques, such as with an enzyme linked immunosorbent assay (ELISA) using immobilized 140, 1470, 1686, 2089, 2427, 3702, 5891, 6428, 7181, 7660, 25641, 69583, 49863, 8897, 1682, 17667, 9235, 3703, 14171, 10359, 1660, 1450, 18894, 2088, 32427, 2160, 9252, 9389, 1642, 85269, 10297, 1584, 9525, 14124, 4469, 8990, 2100, 9288, 64698, 10480, 20893, 33230, 1586, 9943, 16334, 68862, 9011, 14031, 6178, 21225, 1420, 32236, 2099, 2150, 26583, 2784, 8941, 9811, 27444, 50566 or 66428. If desired, the antibody molecules directed against 140, 1470, 1686, 2089, 2427, 3702, 5891, 6428, 7181, 7660, 25641, 69583, 49863, 8897, 1682, 17667, 9235, 3703, 14171, 10359, 1660, 1450, 18894, 2088, 32427, 2160, 9252, 9389, 1642, 85269, 10297, 1584, 9525, 14124, 4469, 8990, 2100, 9288, 64698, 10480, 20893, 33230, 1586, 9943, 16334, 68862, 9011, 14031, 6178, 21225, 1420, 32236, 2099, 2150, 26583, 2784, 8941, 9811, 27444, 50566 or 66428 can be isolated from the mammal (e.g., from the blood) and further purified by well known techniques, such as protein A chromatography to obtain the IgG fraction. At an appropriate time after immunization, e.g., when the anti-140, 1470, 1686, 2089, 2427, 3702, 5891, 6428, 7181, 7660, 25641, 69583, 49863, 8897, 1682, 17667, 9235, 3703, 14171, 10359, 1660, 1450, 18894, 2088, 32427, 2160, 9252, 9389, 1642, 85269, 10297, 1584, 9525, 14124, 4469, 8990, 2100, 9288, 64698, 10480, 20893, 33230, 1586, 9943, 16334, 68862, 9011, 14031, 6178, 21225, 1420, 32236, 2099, 2150, 26583, 2784, 8941, 9811, 27444, 50566 or 66428 antibody titers are highest, antibody-producing cells can be obtained from the subject and used to prepare monoclonal antibodies by standard techniques, such as the hybridoma technique originally described by Kohler and Milstein (1975) Nature 256:495-497) (see also, Brown et al. (1981) J. Immunol. 127:539-46; Brown et al. (1980) J. Biol. Chem. 255:4980-83; Yeh et al. (1976) Proc. Natl. Acad. Sci. USA 76:2927-31; and Yeh et al. (1982) Int. J. Cancer 29:269-75), the more recent human B cell hybridoma technique (Kozbor et al. (1983) Immunol Today 4:72), the EBV-hybridoma technique (Cole et al. (1985) Monoclonal Antibodies and Cancer Therapy, Alan R. Liss, Inc., pp. 77-96) or trioma techniques. The technology for producing monoclonal antibody hybridomas is well known (see generally Kenneth, R. H. in Monoclonal Antibodies: A New Dimension In Biological Analyses, Plenum Publishing Corp., New York, N.Y. (1980); Lerner, E. A. (1981) Yale J. Biol. Med. 54:387-402; Gefter, M. L. et al. (1977) Somatic Cell Genet. 3:231-36). Briefly, an immortal cell line (typically a myeloma) is fused to lymphocytes (typically splenocytes) from a mammal immunized with a 140, 1470, 1686, 2089, 2427, 3702, 5891, 6428, 7181, 7660, 25641, 69583, 49863, 8897, 1682, 17667, 9235, 3703, 14171, 10359, 1660, 1450, 18894, 2088, 32427, 2160, 9252, 9389, 1642, 85269, 10297, 1584, 9525, 14124, 4469, 8990, 2100, 9288, 64698, 10480, 20893, 33230, 1586, 9943, 16334, 68862, 9011, 14031, 6178, 21225, 1420, 32236, 2099, 2150, 26583, 2784, 8941, 9811, 27444, 50566 or 66428 immunogen as described above, and the culture supernatants of the resulting hybridoma cells are screened to identify a hybridoma producing a monoclonal antibody that binds 140, 1470, 1686, 2089, 2427, 3702, 5891, 6428, 7181, 7660, 25641, 69583, 49863, 8897, 1682, 17667, 9235, 3703, 14171, 10359, 1660, 1450, 18894, 2088, 32427, 2160, 9252, 9389, 1642, 85269, 10297, 1584, 9525, 14124, 4469, 8990, 2100, 9288, 64698, 10480, 20893, 33230, 1586, 9943, 16334, 68862, 9011, 14031, 6178, 21225, 1420, 32236, 2099, 2150, 26583, 2784, 8941, 9811, 27444, 50566 or 66428.

[0724] Any of the many well known protocols used for fusing lymphocytes and immortalized cell lines can be applied for the purpose of generating an anti-140, 1470, 1686, 2089, 2427, 3702, 5891, 6428, 7181, 7660, 25641, 69583, 49863, 8897, 1682, 17667, 9235, 3703, 14171, 10359, 1660, 1450, 18894, 2088, 32427, 2160, 9252, 9389, 1642, 85269, 10297, 1584, 9525, 14124, 4469, 8990, 2100, 9288, 64698, 10480, 20893, 33230, 1586, 9943, 16334, 68862, 9011, 14031, 6178, 21225, 1420, 32236, 2099, 2150, 26583, 2784, 8941, 9811, 27444, 50566 or 66428 monoclonal antibody (see, e.g., G. Galfre et al. (1977) Nature 266:55052; Gefter et al. (1977) supra; Lerner (1981) supra; and Kenneth (1980) supra). Moreover, the ordinarily skilled worker will appreciate that there are many variations of such methods which also would be useful. Typically, the immortal cell line (e.g., a myeloma cell line) is derived from the same mammalian species as the lymphocytes. For example, murine hybridomas can be made by fusing lymphocytes from a mouse immunized with an immunogenic preparation of the present invention with an immortalized mouse cell line. Preferred immortal cell lines are mouse myeloma cell lines that are sensitive to culture medium containing hypoxanthine, aminopterin and thymidine (“HAT medium”). Any of a number of myeloma cell lines can be used as a fusion partner according to standard techniques, e.g., the P3-NS1/1-Ag4-1, P3-x63-Ag8.653 or Sp2/O-Ag14 myeloma lines. These myeloma lines are available from ATCC. Typically, HAT-sensitive mouse myeloma cells are fused to mouse splenocytes using polyethylene glycol (“PEG”). Hybridoma cells resulting from the fusion are then selected using HAT medium, which kills unfused and unproductively fused myeloma cells (unfused splenocytes die after several days because they are not transformed). Hybridoma cells producing a monoclonal antibody of the invention are detected by screening the hybridoma culture supernatants for antibodies that bind 140, 1470, 1686, 2089, 2427, 3702, 5891, 6428, 7181, 7660, 25641, 69583, 49863, 8897, 1682, 17667, 9235, 3703, 14171, 10359, 1660, 1450, 18894, 2088, 32427, 2160, 9252, 9389, 1642, 85269, 10297, 1584, 9525, 14124, 4469, 8990, 2100, 9288, 64698, 10480, 20893, 33230, 1586, 9943, 16334, 68862, 9011, 14031, 6178, 21225, 1420, 32236, 2099, 2150, 26583, 2784, 8941, 9811, 27444, 50566 or 66428, e.g., using a standard ELISA assay.

[0725] Alternative to preparing monoclonal antibody-secreting hybridomas, a monoclonal anti-140, 1470, 1686, 2089, 2427, 3702, 5891, 6428, 7181, 7660, 25641, 69583, 49863, 8897, 1682, 17667, 9235, 3703, 14171, 10359, 1660, 1450, 18894, 2088, 32427, 2160, 9252, 9389, 1642, 85269, 10297, 1584, 9525, 14124, 4469, 8990, 2100, 9288, 64698, 10480, 20893, 33230, 1586, 9943, 16334, 68862, 9011, 14031, 6178, 21225, 1420, 32236, 2099, 2150, 26583, 2784, 8941, 9811, 27444, 50566 or 66428 antibody can be identified and isolated by screening a recombinant combinatorial immunoglobulin library (e.g., an antibody phage display library) with 140, 1470, 1686, 2089, 2427, 3702, 5891, 6428, 7181, 7660, 25641, 69583, 49863, 8897, 1682, 17667, 9235, 3703, 14171, 10359, 1660, 1450, 18894, 2088, 32427, 2160, 9252, 9389, 1642, 85269, 10297, 1584, 9525, 14124, 4469, 8990, 2100, 9288, 64698, 10480, 20893, 33230, 1586, 9943, 16334, 68862, 9011, 14031, 6178, 21225, 1420, 32236, 2099, 2150, 26583, 2784, 8941, 9811, 27444, 50566 or 66428 to thereby isolate immunoglobulin library members that bind 140, 1470, 1686, 2089, 2427, 3702, 5891, 6428, 7181, 7660, 25641, 69583, 49863, 8897, 1682, 17667, 9235, 3703, 14171, 10359, 1660, 1450, 18894, 2088, 32427, 2160, 9252, 9389, 1642, 85269, 10297, 1584, 9525, 14124, 4469, 8990, 2100, 9288, 64698, 10480, 20893, 33230, 1586, 9943, 16334, 68862, 9011, 14031, 6178, 21225, 1420, 32236, 2099, 2150, 26583, 2784, 8941, 9811, 27444, 50566 or 66428. Kits for generating and screening phage display libraries are commercially available (e.g., the Pharmacia Recombinant Phage Antibody System, Catalog No. 27-9400-01; and the Stratagene SurfZAP™ Phage Display Kit, Catalog No. 240612). Additionally, examples of methods and reagents particularly amenable for use in generating and screening antibody display library can be found in, for example, Ladner et al. U.S. Pat. No. 5,223,409; Kang et al. PCT International Publication No. WO 92/18619; Dower et al. PCT International Publication No. WO 91/17271; Winter et al. PCT International Publication WO 92/20791; Markland et al. PCT International Publication No. WO 92/15679; Breitling et al. PCT International Publication WO 93/01288; McCafferty et al. PCT International Publication No. WO 92/01047; Garrard et al. PCT International Publication No. WO 92/09690; Ladner et al. PCT International Publication No. WO 90/02809; Fuchs et al. (1991) Bio/Technology 9:1370-1372; Hay et al. (1992) Hum. Antibod. Hybridomas 3:81-85; Huse et al. (1989) Science 246:1275-1281; Griffiths et al. (1993) EMBO J 12:725-734; Hawkins et al. (1992) J. Mol. Biol. 226:889-896; Clarkson et al. (1991) Nature 352:624-628; Gram et al. (1992) Proc. Natl. Acad. Sci. USA 89:3576-3580; Garrad et al. (1991) Bio/Technology 9:1373-1377; Hoogenboom et al. (1991) Nuc. Acid Res. 19:4133-4137; Barbas et al. (1991) Proc. Natl. Acad. Sci. USA 88:7978-7982; and McCafferty et al. (1990) Nature 348:552-554.

[0726] Additionally, recombinant anti-140, 1470, 1686, 2089, 2427, 3702, 5891, 6428, 7181, 7660, 25641, 69583, 49863, 8897, 1682, 17667, 9235, 3703, 14171, 10359, 1660, 1450, 18894, 2088, 32427, 2160, 9252, 9389, 1642, 85269, 10297, 1584, 9525, 14124, 4469, 8990, 2100, 9288, 64698, 10480, 20893, 33230, 1586, 9943, 16334, 68862, 9011, 14031, 6178, 21225, 1420, 32236, 2099, 2150, 26583, 2784, 8941, 9811, 27444, 50566 or 66428 antibodies, such as chimeric and humanized monoclonal antibodies, comprising both human and non-human portions, which can be made using standard recombinant DNA techniques, are within the scope of the methods of the invention. Such chimeric and humanized monoclonal antibodies can be produced by recombinant DNA techniques known in the art, for example using methods described in Robinson et al. International Application No. PCT/US86/02269; Akira, et al. European Patent Application 184,187; Taniguchi, M., European Patent Application 171,496; Morrison et al. European Patent Application 173,494; Neuberger et al. PCT International Publication No. WO 86/01533; Cabilly et al. U.S. Pat. No. 4,816,567; Cabilly et al. European Patent Application 125,023; Better et al. (1988) Science 240:1041-1043; Liu et al. (1987) Proc. Natl. Acad. Sci. USA 84:3439-3443; Liu et al. (1987) J. Immunol. 139:3521-3526; Sun et al. (1987) Proc. Natl. Acad. Sci. USA 84:214-218; Nishimura et al. (1987) Canc. Res. 47:999-1005; Wood et al. (1985) Nature 314:446-449; Shaw et al. (1988) J. Natl. Cancer Inst. 80:1553-1559; Morrison, S. L. (1985) Science 229:1202-1207; Oi et al. (1986) BioTechniques 4:214; Winter U.S. Pat. No. 5,225,539; Jones et al. (1986) Nature 321:552-525; Verhoeyan et al. (1988) Science 239:1534; and Beidler et al. (1988) J. Immunol. 141:4053-4060.

[0727] An anti-140, 1470, 1686, 2089, 2427, 3702, 5891, 6428, 7181, 7660, 25641, 69583, 49863, 8897, 1682, 17667, 9235, 3703, 14171, 10359, 1660, 1450, 18894, 2088, 32427, 2160, 9252, 9389, 1642, 85269, 10297, 1584, 9525, 14124, 4469, 8990, 2100, 9288, 64698, 10480, 20893, 33230, 1586, 9943, 16334, 68862, 9011, 14031, 6178, 21225, 1420, 32236, 2099, 2150, 26583, 2784, 8941, 9811, 27444, 50566 or 66428 antibody can be used to detect 140, 1470, 1686, 2089, 2427, 3702, 5891, 6428, 7181, 7660, 25641, 69583, 49863, 8897, 1682, 17667, 9235, 3703, 14171, 10359, 1660, 1450, 18894, 2088, 32427, 2160, 9252, 9389, 1642, 85269, 10297, 1584, 9525, 14124, 4469, 8990, 2100, 9288, 64698, 10480, 20893, 33230, 1586, 9943, 16334, 68862, 9011, 14031, 6178, 21225, 1420, 32236, 2099, 2150, 26583, 2784, 8941, 9811, 27444, 50566 or 66428 protein (e.g., in a cellular lysate or cell supernatant) in order to evaluate the abundance and pattern of expression of the 140, 1470, 1686, 2089, 2427, 3702, 5891, 6428, 7181, 7660, 25641, 69583, 49863, 8897, 1682, 17667, 9235, 3703, 14171, 10359, 1660, 1450, 18894, 2088, 32427, 2160, 9252, 9389, 1642, 85269, 10297, 1584, 9525, 14124, 4469, 8990, 2100, 9288, 64698, 10480, 20893, 33230, 1586, 9943, 16334, 68862, 9011, 14031, 6178, 21225, 1420, 32236, 2099, 2150, 26583, 2784, 8941, 9811, 27444, 50566 or 66428 protein. Anti-140, 1470, 1686, 2089, 2427, 3702, 5891, 6428, 7181, 7660, 25641, 69583, 49863, 8897, 1682, 17667, 9235, 3703, 14171, 10359, 1660, 1450, 18894, 2088, 32427, 2160, 9252, 9389, 1642, 85269, 10297, 1584, 9525, 14124, 4469, 8990, 2100, 9288, 64698, 10480, 20893, 33230, 1586, 9943, 16334, 68862, 9011, 14031, 6178, 21225, 1420, 32236, 2099, 2150, 26583, 2784, 8941, 9811, 27444, 50566 or 66428 antibodies can be used diagnostically to monitor protein levels in tissue as part of a clinical testing procedure, e.g., to, for example, determine the efficacy of a given treatment regimen. Detection can be facilitated by coupling (i.e., physically linking) the antibody to a detectable substance. Examples of detectable substances include various enzymes, prosthetic groups, fluorescent materials, luminescent materials, bioluminescent materials, and radioactive materials. Examples of suitable enzymes include horseradish peroxidase, alkaline phosphatase, β-galactosidase, or acetylcholinesterase; examples of suitable prosthetic group complexes include streptavidin/biotin and avidin/biotin; examples of suitable fluorescent materials include umbelliferone, fluorescein, fluorescein isothiocyanate, rhodamine, dichlorotriazinylamine fluorescein, dansyl chloride or phycoerythrin; an example of a luminescent material includes luminol; examples of bioluminescent materials include luciferase, luciferin, and aequorin, and examples of suitable radioactive material include ¹²⁵I, ¹³¹I, ³⁵S or ³H.

[0728] This invention is further illustrated by the following examples which should not be construed as limiting. The contents of all references, patents and published patent applications cited throughout this application, as well as the Figure and the Sequence Listing is incorporated herein by reference.

### EXAMPLES

### Example 1

### Tissue Distribution of Using Taqman™ Analysis

[0729] This example describes the TaqMan™ procedure. The Taqman™ procedure is a quantitative, reverse transcription PCR-based approach for detecting mRNA. The RT-PCR reaction exploits the 5′ nuclease activity of AmpliTaq Gold™ DNA Polymerase to cleave a TaqMan™ probe during PCR. Briefly, cDNA was generated from the samples of interest, e.g., heart, kidney, liver, skeletal muscle, and various vessels, and used as the starting material for PCR amplification. In addition to the 5′ and 3′ gene-specific primers, a gene-specific oligonucleotide probe (complementary to the region being amplified) was included in the reaction (i.e., the Taqman™ probe). The TaqMan™ probe includes the oligonucleotide with a fluorescent reporter dye covalently linked to the 5′ end of the probe (such as FAM (6-carboxyfluorescein), TET (6-carboxy-4,7,2′,7′-tetrachlorofluorescein), JOE (6-carboxy-4,5-dichloro-2,7-dimethoxyfluorescein), or VIC) and a quencher dye (TAMRA (6-carboxy-N,N,N′,N′-tetramethylrhodamine) at the 3′ end of the probe.

[0730] During the PCR reaction, cleavage of the probe separates the reporter dye and the quencher dye, resulting in increased fluorescence of the reporter. Accumulation of PCR products is detected directly by monitoring the increase in fluorescence of the reporter dye. When the probe is intact, the proximity of the reporter dye to the quencher dye results in suppression of the reporter fluorescence. During PCR, if the target of interest is present, the probe specifically anneals between the forward and reverse primer sites. The 5′-3′ nucleolytic activity of the AmpliTaq™ Gold DNA Polymerase cleaves the probe between the reporter and the quencher only if the probe hybridizes to the target. The probe fragments are then displaced from the target, and polymerization of the strand continues. The 3′ end of the probe is blocked to prevent extension of the probe during PCR. This process occurs in every cycle and does not interfere with the exponential accumulation of product. RNA was prepared using the trizol method and treated with DNase to remove contaminating genomic DNA. cDNA was synthesized using standard techniques. Mock cDNA synthesis in the absence of reverse transcriptase resulted in samples with no detectable PCR amplification of the control gene confirms efficient removal of genomic DNA contamination.

[0731] Equivalents

[0732] Those skilled in the art will recognize, or be able to ascertain using no more than routine experimentation, many equivalents to the specific embodiments of the invention described herein. Such equivalents are intended to be encompassed by the following claims.

The application's sequence listing, which the Patent Office published only in electronic form, follows.

SEQUENCE LISTING (122 sequences)

SEQ ID NO: 1 - DNA, 1281 bp, Homo sapiens
  CDS (62)...(1114)
cccagacctagaactacccagagcaagaccacagctggtgaacagtccaggagcagacaagatggagacaaattcctctctccccacgaacatctctggagggacacctgctgtatctgctggctatctcttcctggatatcatcacttatctggtatttgcagtcacctttgtcctcggggtcctgggcaacgggcttgtgatctgggtggctggattccggatgacacacacagtcaccaccatcagttacctgaacctggccgtggctgacttctgtttcacctccactttgccattcttcatggtcaggaaggccatgggaggacattggcctttcggctggttcctgtgcaaattcgtctttaccatagtggacatcaacttgttcggaagtgtcttcctgatcgccctcattgctctggaccgctgtgtttgcgtcctgcatccagtctggacccagaaccaccgcaccgtgagcctggccaagaaggtgatcattgggccctgggtgatggctctgctcctcacattgccagttatcattcgtgtgactacagtacctggtaaaacggggacagtagcctgcacttttaacttttcgccctggaccaacgaccctaaagagaggataaatgtggccgttgccatgttgacggtgagaggcatcatccggttcatcattggcttcagcgcacccatgtccatcgttgctgtcagttatgggcttattgccaccaagatccacaagcaaggcttgattaagtccagtcgtcccttacgggtcctctcctttgtcgcagcagccttttttctctgctggtccccatatcaggtggtggcccttatagccacagtcagaatccgtgagttattgcaaggcatgtacaaagaaattggtattgcagtggatgtgacaagtgccctggccttcttcaacagctgcctcaaccccatgctctatgtcttcatgggccaggacttccgggagaggctgatccacgcccttcccgccagtctggagagggccctgaccgaggactcaacccaaaccagtgacacagctaccaattctactttaccttctgcagaggtggagttacaggcaaagtgaggagggagctgggggacactttcgagctcccagctccagcttcgtctcaccttgagttaggctgagcacaggcatttcctgcttattttaggattacccactcatcagaaaaaaaaaaaaaagcctttgtgtcccctgatttggggagaataaacagatatgagttt

SEQ ID NO: 2 - protein, 350 aa, Homo sapiens
METNSSLPTNISGGTPAVSAGYLFLDIITYLVFAVTFVLGVLGNGLVIWVAGFRMTHTVTTISYLNLAVADFCFTSTLPFFMVRKAMGGHWPFGWFLCKFVFTIVDINLFGSVFLIALIALDRCVCVLHPVWTQNHRTVSLAKKVIIGPWVMALLLTLPVIIRVTTVPGKTGTVACTFNFSPWTNDPKERINVAVAMLTVRGIIRFIIGFSAPMSIVAVSYGLIATKIHKQGLIKSSRPLRVLSFVAAAFFLCWSPYQVVALIATVRIRELLQGMYKEIGIAVDVTSALAFFNSCLNPMLYVFMGQDFRERLIHALPASLERALTEDSTQTSDTATNSTLPSAEVELQAK

SEQ ID NO: 3 - DNA, 3805 bp, Homo sapiens
  CDS (28)...(3024)
ggctcggctcctagagctgccacggccatggccagagcccgcccgccgccgccgccgtcgccgccgccggggcttctgccgctgctccctccgctgctgctgctgccgctgctgctgctgcccgccggctgccgggcgctggaagagaccctcatggacacaaaatgggtaacatctgagttggcgtggacatctcatccagaaagtgggtgggaagaggtgagtggctacgatgaggccatgaatcccatccgcacataccaggtgtgtaatgtgcgcgagtcaagccagaacaactggcttcgcacggggttcatctggcggcgggatgtgcagcgggtctacgtggagctcaagttcactgtgcgtgactgcaacagcatccccaacatccccggctcctgcaaggagaccttcaacctcttctactacgaggctgacagcgatgtggcctcagcctcctcccccttctggatggagaacccctacgtgaaagtggacaccattgcacccgatgagagcttctcgcggctggatgccggccgtgtcaacaccaaggtgcgcagctttgggccactttccaaggctggcttctacctggccttccaggaccagggcgcctgcatgtcgctcatctccgtgcgcgccttctacaagaagtgtgcatccaccaccgcaggcttcgcactcttccccgagaccctcactggggcggagcccacctcgctggtcattgctcctggcacctgcatccctaacgccgtggaggtgtcggtgccactcaagctctactgcaacggcgatggggagtggatggtgcctgtgggtgcctgcacctgtgccaccggccatgagccagctgccaaggagtcccagtgccgcccctgtccccctgggagctacaaggcgaagcagggagaggggccctgcctcccatgtccccccaacagccgtaccacctccccagccgccagcatctgcacctgccacaataacttctaccgtgcagactcggactctgcggacagtgcctgtaccaccgtgccatctccaccccgaggtgtgatctccaatgtgaatgaaacctcactgatcctcgagtggagtgagccccgggacctgggtgtccgggatgacctcctgtacaatgtcatctgcaagaagtgccatggggctggaggggcctcagcctgctcacgctgtgatgacaacgtggagtttgtgcctcggcagctgggcctgtcggagccccgggtccacaccagccatctgctggcccacacgcgctacacctttgaggtgcaggcggtcaacggtgtctcgggcaagagccctctgccgcctcgttatgcggccgtgaatatcaccacaaaccaggctgccccgtctgaagtgcccacactacgcctgcacagcagctcaggcagcagcctcaccctatcctgggcacccccagagcggcccaacggagtcatcctggactacgagatgaagtactttgagaagagcgagggcatcgcctccacagtgaccagccagatgaactccgtgcagctggacgggcttcggcctgacgcccgctatgtggtccaggtccgtgcccgcacagtagctggctatgggcagtacagccgccctgccgagtttgagaccacaagtgagagaggctctggggcccagcagctccaggagcagcttcccctcatcgtgggctccgctacagctgggcttgtcttcgtggtggctgtcgtggtcatcgctatcgtctgcctcaggaagcagcgacacggctctgattcggagtacacggagaagctgcagcagtacattgctcctggaatgaaggtttatattgacccttttacctacgaggaccctaatgaggctgttcgggagtttgccaaggagatcgacgtgtcctgcgtcaagatcgaggaggtgatcggagctggggaatttggggaagtgtgccgtggtcgactgaaacagcctggccgccgagaggtgtttgtggccatcaagacgctgaaggtgggctacaccgagaggcagcggcgggacttcctaagcgaggcctccatcatgggtcagtttgatcaccccaatataatccggctcgagggcgtggtcaccaaaagtcggccagttatgatcctcactgagttcatggaaaactgcgccctggactccttcctccggctcaacgatgggcagttcacggtcatccagctggtgggcatgttgcggggcattgctgccggcatgaagtacctgtccgagatgaactatgtgcaccgcgacctggctgctcgcaacatccttgtcaacagcaacctggtctgcaaagtctcagactttggcctctcccgcttcctggaggatgacccctccgatcctacctacaccagttccctgggcgggaagatccccatccgctggactgccccagaggccatagcctatcggaagttcacttctgctagtgatgtctggagctacggaattgtcatgtgggaggtcatgagctatggagagcgaccctactgggacatgagcaaccaggatgtcatcaatgccgtggagcaggattaccggctgccaccacccatggactgtcccacagcactgcaccagctcatgctggactgctgggtgcgggaccggaacctcaggcccaaattctcccagattgtcaataccctggacaagctcatccgcaatgctgccagcctcaaggtcattgccagcgctcagtctggcatgtcacagcccctcctggaccgcacggtcccagattacacaaccttcacgacagttggtgattggctggatgccatcaagatggggcggtacaaggagagcttcgtcagtgcggggtttgcatcttttgacctggtggcccagatgacggcagaagacctgctccgtattggggtcaccctggccggccaccagaagaagatcctgagcagtatccaggacatgcggctgcagatgaaccagacgctgcctgtgcaggtctgacaccggctcccacggggaccctgaggaccgtgcagggatgccaagcagccggctggactttcggactcttggacttttggatgcctggccttaggctgtggcccagaagctggaagtttgggaaaggcccaagctgggacttctccaggcctgtgttccctccccaggaagtgcgccccaaacctcttcatattgaagatggattaggagagggggtgatgacccctccccaagcccctcagggcccagaccttcctgctctccagcaggggatccccacaacctcacacttgtctgttcttcagtgctggaggtcctggcagggtcaggctggggtaagccggggttccacagggcccagccctggcaggggtctggccccccaggtaggcggagagcagtccctccctcaggaactggaggaggggactccaggaatggggaaatgtgacaccaccatcctgaagccagcttgcacctccagtttgcacagggatttgtcctgggggctgagggccctgtccccacccccgcccttggtgctgtcataaaagggcaggcaggggcaggctgaggagttgcccgttgccccccagagactgactctcagagccagagatgggatgtgtgagtgtgtgtgtgtgtgtgtgcgcgcgcgcgcgcgtgtgtgtgtgcacgcactggcctgcacagagagcatgggtgagcgtgtaaaagcttggccctgtgccctacagtggggacagctgggccgacagcagaataaaggcaataagatgaa

SEQ ID NO: 4 - protein, 998 aa, Homo sapiens [sequence omitted]

SEQ ID NO: 5 - DNA, 3949 bp, Homo sapiens
  CDS (225)...(2897)
gcggtggcgcgggagcggccccggggaccccgcgctgctgacggcggcgaccgcggccggaggcgggcgcgggtctcggaggcggtcgcctcagcaccgccccacgggcggccccagcccctcccgcagccctcctccctcccgctcccttcccgccgcctcctccccgccctcctccctcctcgctcgcgggccgggcccggcatggtgcggcgtcgccgccgatggcgctgaggcggagcatggggcggccggggctcccgccgctgccgctgccgccgccaccgcggctcgggctgctgctggcggctctggcttctctgctgctcccggagtccgccgccgcaggtctgaagctcatgggagccccggtgaagctgacagtgtctcaggggcagccggtgaagctcaactgcagtgtggaggggatggaggagcctgacatccagtgggtgaaggatggggctgtggtccagaacttggaccagttgtacatcccagtcagcgagcagcactggatcggcttcctcagcctgaagtcagtggagcgctctgacgccggccggtactggtgccaggtggaggatgggggtgaaaccgagatctcccagccagtgtggctcacggtagaaggtgtgccatttttcacagtggagccaaaagatctggcagtgccacccaatgcccctttccaactgtcttgtgaggctgtgggtccccctgaacctgttaccattgtctggtggagaggaactacgaagatcgggggacccgctccctctccatctgttttaaatgtaacaggggtgacccagagcaccatgttttcctgtgaagctcacaacctaaaaggcctggcctcttctcgcacagccactgttcaccttcaagcactgcctgcagcccccttcaacatcaccgtgacaaagctttccagcagcaacgctagtgtggcctggatgccaggtgctgatggccgagctctgctacagtcctgtacagttcaggtgacacaggccccaggaggctgggaagtcctggctgttgtggtccctgtgcccccctttacctgcctgctccgggacctggtgcctgccaccaactacagcctcagggtgcgctgtgccaatgccttggggccctctccctatgctgactgggtgccctttcagaccaagggtctagccccagccagcgctccccaaaacctccatgccatccgcacagattcaggcctcatcttggagtgggaagaagtgatccccgaggcccctttggaaggccccctgggaccctacaaactgtcctgggttcaagacaatggaacccaggatgagctgacagtggaggggaccagggccaatttgacaggctgggatccccaaaaggacctgatcgtacgtgtgtgcgtctccaatgcagttggctgtggaccctggagtcagccactggtggtctcttctcatgaccgtgcaggccagcagggccctcctcacagccgcacatcctgggtacctgtggtccttggtgtgctaacggccctggtgacggctgctgccctggccctcatcctgcttcgaaagagacggaaagagacgcggtttgggcaagcctttgacagtgtcatggcccggggagagccagccgttcacttccgggcagcccggtccttcaatcgagaaaggcccgagcgcatcgaggccacattggacagcttgggcatcagcgatgaactaaaggaaaaactggaggatgtgctcatcccagagcagcagttcaccctgggccggatgttgggcaaaggagagtttggttcagtgcgggaggcccagctgaagcaagaggatggctcctttgtgaaagtggctgtgaagatgctgaaagctgacatcattgcctcaagcgacattgaagagttcctcagggaagcagcttgcatgaaggagtttgaccatccacacgtggccaaacttgttggggtaagcctccggagcagggctaaaggccgtctccccatccccatggtcatcttgcccttcatgaagcatggggacctgcatgccttcctgctcgcctcccggattggggagaacccctttaacctacccctccagaccctgatccggttcatggtggacattgcctgcggcatggagtacctgagctctcggaacttcatccaccgagacctggctgctcggaattgcatgctggcagaggacatgacagtgtgtgtggctgacttcggactctcccggaagatctacagtggggactactatcgtcaaggctgtgcctccaaactgcctgtcaagtggctggccctggagagcctggccgacaacctgtatactgtgcagagtgacgtgtgggcgttcggggtgaccatgtgggagatcatgacacgtgggcagacgccatatgctggcatcgaaaacgctgagatttacaactacctcattggcgggaaccgcctgaaacagcctccggagtgtatggaggacgtgtatgatctcatgtaccagtgctggagtgctgaccccaagcagcgcccgagctttacttgtctgcgaatggaactggagaacatcttgggccagctgtctgtgctatctgccagccaggaccccttatacatcaacatcgagagagctgaggagcccactgcgggaggcagcctggagctacctggcagggatcagccctacagtggggctggggatggcagtggcatgggggcagtgggtggcactcccagtgactgtcggtacatactcacccccggagggctggctgagcagccagggcaggcagagcaccagccagagagtcccctcaatgagacacagaggcttttgctgctgcagcaagggctactgccacacagtagctgttagcccacaggcagagggcatcggggccatttggccggctctggtggccactgagctggctgactaagccccgtctgaccccagcccagacagcaaggtgtggaggctcctgtggtagtcctcccaagctgtgctgggaagcccggactgaccaaatcacccaatcccagttcttcctgcaaccactctgtggccagcctggcatcagtttaggccttggcttgatggaagtgggccagtcctggttgtctgaacccaggcagctggcaggagtggggtggttatgtttccatggttaccatgggtgtggatggcagtgtggggagggcaggtccagctctgtgggccctaccctcctgctgagctgcccctgctgcttaagtgcatgcattgagctgcctccagcctggtggcccagctattaccacacttggggtttaaatatccaggtgtgcccctccaagtcacaaagagatgtccttgtaatattcccttttaggtgagggttggtaaggggttggtatctcaggtctgaatcttcaccatctttctgattccgcaccctgcctacgccaggagaagttgaggggagcatgcttccctgcagctgaccgggtcacacaaaggcatgctggagtacccagcctatcaggtgcccctcttccaaaggcagcgtgccgagccagcaagaggaaggggtgctgtgaggcttgcccaggagcaagtgaggccggagaggagttcaggaacccttctccatacccacaatctgagcacgctaccaaatctcaaaatatcctaagactaacaaaggcagctgtgtctgagcccaacccttctaaacggtgacctttagtgccaacttcccctctaactggacagcctcttctgtcccaagtctccagagagaaatcaggcctgatgagggggaattcctggaacctggaccccagccttggtgggggagcctctggaatgcatggggcgggtcctagctgttagggacatttccaagctgttagttgctgtttaaaatagaaataaaattgaagact

SEQ ID NO: 6 - protein, 890 aa, Homo sapiens
MALRRSMGRPGLPPLPLPPPPRLGLLLAALASLLLPESAAAGLKLMGAPVKLTVSQGQPVKLNCSVEGMEEPDIQWVKDGAVVQNLDQLYIPVSEQHWIGFLSLKSVERSDAGRYWCQVEDGGETEISQPVWLTVEGVPFFTVEPKDLAVPPNAPFQLSCEAVGPPEPVTIVWWRGTTKIGGPAPSPSVLNVTGVTQSTMFSCEAHNLKGLASSRTATVHLQALPAAPFNITVTKLSSSNASVAWMPGADGRALLQSCTVQVTQAPGGWEVLAVVVPVPPFTCLLRDLVPATNYSLRVRCANALGPSPYADWVPFQTKGLAPASAPQNLHAIRTDSGLILEWEEVIPEAPLEGPLGPYKLSWVQDNGTQDELTVEGTRANLTGWDPQKDLIVRVCVSNAVGCGPWSQPLVVSSHDRAGQQGPPHSRTSWVPVVLGVLTALVTAAALALILLRKRRKETRFGQAFDSVMARGEPAVHFRAARSFNRERPERIEATLDSLGISDELKEKLEDVLIPEQQFTLGRMLGKGEFGSVREAQLKQEDGSFVKVAVKMLKADIIASSDIEEFLREAACMKEFDHPHVAKLVGVSLRSRAKGRLPIPMVILPFMKHGDLHAFLLASRIGENPFNLPLQTLIRFMVDIACGMEYLSSRNFIHRDLAARNCMLAEDMTVCVADFGLSRKIYSGDYYRQGCASKLPVKWLALESLADNLYTVQSDVWAFGVTMWEIMTRGQTPYAGIENAEIYNYLIGGNRLKQPPECMEDVYDLMYQCWSADPKQRPSFTCLRMELENILGQLSVLSASQDPLYINIERAEEPTAGGSLELPGRDQPYSGAGDGSGMGAVGGTPSDCRYILTPGGLAEQPGQAEHQPESPLNETQRLLLLQQGLLPHSSC

SEQ ID NO: 7 - DNA, 2470 bp, Homo sapiens
  CDS (171)...(2126)
ttggcgggcggaagcggccacaacccggcgatcgaaaagattcttaggaacgccgtaccagccgcgtctctcaggacagcaggcccctgtccttctgtcgggcgccgctcagccgtgccctccgcccctcaggttctttttctaattccaaataaacttgcaagaggactatgaaagattatgatgaacttctcaaatattatgaattacatgaaactattgggacaggtggctttgcaaaggtcaaacttgcctgccatatccttactggagagatggtagctataaaaatcatggataaaaacacactagggagtgatttgccccggatcaaaacggagattgaggccttgaagaacctgagacatcagcatatatgtcaactctaccatgtgctagagacagccaacaaaatattcatggttcttgagtactgccctggaggagagctgtttgactatataatttcccaggatcgcctgtcagaagaggagacccgggttgtcttccgtcagatagtatctgctgttgcttatgtgcacagccagggctatgctcacagggacctcaagccagaaaatttgctgtttgatgaatatcataaattaaagctgattgactttggtctctgtgcaaaacccaagggtaacaaggattaccatctacagacatgctgtgggagtctggcttatgcagcacctgagttaatacaaggcaaatcatatcttggatcagaggcagatgtttggagcatgggcatactgttatatgttcttatgtgtggatttctaccatttgatgatgataatgtaatggctttatacaagaagattatgagaggaaaatatgatgttcccaagtggctctctcccagtagcattctgcttcttcaacaaatgctgcaggtggacccaaagaaacggatttctatgaaaaatctattgaaccatccctggatcatgcaagattacaactatcctgttgagtggcaaagcaagaatccttttattcacctcgatgatgattgcgtaacagaactttctgtacatcacagaaacaacaggcaaacaatggaggatttaatttcactgtggcagtatgatcacctcacggctacctatcttctgcttctagccaagaaggctcggggaaaaccagttcgtttaaggctttcttctttctcctgtggacaagccagtgctaccccattcacagacatcaagtcaaataattggagtctggaagatgtgaccgcaagtgataaaaattatgtggcgggattaatagactatgattggtgtgaagatgatttatcaacaggtgctgctactccccgaacatcacagtttaccaagtactggacagaatcaaatggggtggaatctaaatcattaactccagccttatgcagaacacctgcaaataaattaaagaacaaagaaaatgtatatactcctaagtctgctgtaaagaatgaagagtactttatgtttcctgagccaaagactccagttaataagaaccagcataagagagaaatactcactacgccaaatcgttacactacaccctcaaaagctagaaaccagtgcctgaaagaaactccaattaaaataccagtaaattcaacaggaacagacaagttaatgacaggtgtcattagccctgagaggcggtgccgctcagtggaattggatctcaaccaagcacatatggaggagactccaaaaagaaagggagccaaagtgtttgggagccttgaaagggggttggataaggttatcactgtgctcaccaggagcaaaaggaagggttctgccagagacgggcccagaagactaaagcttcactataatgtgactacaactagattagtgaatccagatcaactgttgaatgaaataatgtctattcttccaaagaagcatgttgactttgtacaaaagggttatacactgaagtgtcaaacacagtcagattttgggaaagtgacaatgcaatttgaattagaagtgtgccagcttcaaaaacccgatgtggtgggtatcaggaggcagcggcttaagggcgatgcctgggtttacaaaagattagtggaagacatcctatctagctgcaaggtataattgatggattcttccatcctgccggatgagtgtgggtgtgatacagcctacataaagactgttatgatcgctttgattttaaagttcattggaactaccaacttgtttctaaagagctatcttaagaccaatatctctttgtttttaaacaaaagatattattttgtgtatgaatctaaatcaagcccatctgtcattatgttactgtcttttttaatcatgtggttttgtatattaataattgttgactttcttagattcacttccatatgtgaatgtaagctcttaactatgtctctttgtaatgtgtaatttctttctgaaataaaaccatttgtgaatat

SEQ ID NO: 8 - protein, 651 aa, Homo sapiens
MKDYDELLKYYELHETIGTGGFAKVKLACHILTGEMVAIKIMDKNTLGSDLPRIKTEIEALKNLRHQHICQLYHVLETANKIFMVLEYCPGGELFDYIISQDRLSEEETRVVFRQIVSAVAYVHSQGYAHRDLKPENLLFDEYHKLKLIDFGLCAKPKGNKDYHLQTCCGSLAYAAPELIQGKSYLGSEADVWSMGILLYVLMCGFLPFDDDNVMALYKKIMRGKYDVPKWLSPSSILLLQQMLQVDPKKRISMKNLLNHPWIMQDYNYPVEWQSKNPFIHLDDDCVTELSVHHRNNRQTMEDLISLWQYDHLTATYLLLLAKKARGKPVRLRLSSFSCGQASATPFTDIKSNNWSLEDVTASDKNYVAGLIDYDWCEDDLSTGAATPRTSQFTKYWTESNGVESKSLTPALCRTPANKLKNKENVYTPKSAVKNEEYFMFPEPKTPVNKNQHKREILTTPNRYTTPSKARNQCLKETPIKIPVNSTGTDKLMTGVISPERRCRSVELDLNQAHMEETPKRKGAKVFGSLERGLDKVITVLTRSKRKGSARDGPRRLKLHYNVTTTRLVNPDQLLNEIMSILPKKHVDFVQKGYTLKCQTQSDFGKVTMQFELEVCQLQKPDVVGIRRQRLKGDAWVYKRLVEDILSSCKV

SEQ ID NO: 9 - DNA, 1571 bp, Homo sapiens
  CDS (277)...(1263)
ctcagtttcctcatctgctgcctctccagacttctgccagaacattgcacgcgacagtttcaggcacagaactgactggcagcaggggctgctccacgagtgggaatttgctccagcacttcacggactgcaagcgaggcacttgctaactcttggataacaagacctctgccagaagaaccatggctttggaaggcggagttcaggctgaggagatgggtgcggtcctcagtgagcccctgcctccctgaacataggaaacccacctgggcagccatggaatgggacaatggcacaggccaggctctgggcttgccacccaccacctgtgtctaccgcgagaacttcaagcaactgctgctgccacctgtgtattcggcggtgctggcggctggcctgccgctgaacatctgtgtcattacccagatctgcacgtcccgccgggccctgacccgcacggccgtgtacaccctaaaccttgctctggctgacctgctatatgcctgctccctgcccctgctcatctacaactatgcccaaggtgatcactggccctttggcgacttcgcctgccgcctggtccgcttcctcttctatgccaacctgcacggcagcatcctcttcctcacctgcatcagcttccagcgctacctgggcatctgccacccgctggccccctggcacaaacgtgggggccgccgggctgcctggctagtgtgtgtagccgtgtggctggccgtgacaacccagtgcctgcccacagccatcttcgctgccacaggcatccagcgtaaccgcactgtctgctatgacctcagcccgcctgccctggccacccactatatgccctatggcatggctctcactgtcatcggcttcctgctgccctttgctgccctgctggcctgctactgtctcctggcctgccgcctgtgccgccaggatggcccggcagagcctgtggcccaggagcggcgtggcaaggcggcccgcatggccgtggtggtggctgctgcctttgccatcagcttcctgccttttcacatcaccaagacagcctacctggcagtgcgctcgacgccgggcgtcccctgcactgtattggaggcctttgcagcggcctacaaaggcacgcggccgtttgccagtgccaacagcgtgctggaccccatcctcttctacttcacccagaagaagttccgccggcgaccacatgagctcctacagaaactcacagccaaatggcagaggcagggtcgctgagtcctccaggtcctgggcagccttcatatttgccattgtgtccggggcaccaggagccccaccaaccccaaaccatgcggagaattagagttcagctcagctgggcatggagttaagatccctcacaggacccagaagctcaccaaaaactatttcttcagccccttctctggcccagaccctgtgggcatggagatggacagacctgggcctggctcttgagaggtcccagtcagccatggagagctggggaaaccacattaaggtgctcacaaaaatacagtgtgacgtgtactgtcaaaaaaaaa

SEQ ID NO: 10 - protein, 328 aa, Homo sapiens
MEWDNGTGQALGLPPTTCVYRENFKQLLLPPVYSAVLAAGLPLNICVITQICTSRRALTRTAVYTLNLALADLLYACSLPLLIYNYAQGDHWPFGDFACRLVRFLFYANLHGSILFLTCISFQRYLGICHPLAPWHKRGGRRAAWLVCVAVWLAVTTQCLPTAIFAATGIQRNRTVCYDLSPPALATHYMPYGMALTVIGFLLPFAALLACYCLLACRLCRQDGPAEPVAQERRGKAARMAVVVAAAFAISFLPFHITKTAYLAVRSTPGVPCTVLEAFAAAYKGTRPFASANSVLDPILFYFTQKKFRRRPHELLQKLTAKWQRQGR

SEQ ID NO: 11 - DNA, 1467 bp, Homo sapiens
  CDS (1)...(1467)
atggagccgttcctcaggaggcggctggccttcctgtccttcttctgggacaagatctggccggcgggcggcgagccggaccatggcacccccgggtccctggaccccaacactgacccagtgcccacgctccccgccgagccttgcagccccttccctcagctcttccttgcgctctatgacttcacggcgcggtgtggcggggagctgagtgtccgccgcggggacaggctctgtgccctcgaagaggggggcggctacatcttcgcacgcaggctttcgggccagcccagcgccgggctcgtgcccatcacccacgtggccaaggcttctcctgagacgctctcagaccaaccctggtactttagcggggtcagtcggacccaggcacagcagctgctcctctccccacccaacgaaccaggggccttcctcatccggcccagcgagagcagcctcgggggctactcactgtcagtccgggcccaggccaaggtctgccactaccgggtctccatggcagctgatggcagcctctacctgcagaagggacggctctttcccggcctggaggagctgctcacctactacaaggccaactggaagctgatccagaaccccctgctgcagccctgcatgccccagaaggccccgaggcaggacgtgtgggagcggccacactccgaattcgcccttgggaggaagctgggtgaaggctactttggggaggtgtgggaaggcctgtggctgggctccctgcccgtggcgatcaaggtcatcaagtcagccaacatgaagctcactgacctcgccaaggagatccagacactgaagggcctgcggcacgagcggctcatccggctgcacgcagtgtgctcgggcggggagcctgtgtacatagtcacggaactcatgcgcaaggggaacctgcaggccttcctgggcacccccgagggccgggccctgcgtctgccgccactcctgggctttgcctgccaggtggctgagggcatgagctacctggaggagcagcgcgttgtgcaccgggacttggccgcccggaacgtgctcgtggacgacggcctggcctgcaaggtggctgacttcggcctggcccggctgctcaaggacgacatctactccccgagcagcagctccaagatcccggtcaagtggacagcgcctgaggcggccaattatcgtgtcttctcccagaagtcagacgtctggtccttcggcgtcctgctgcacgaggttttcacctatggccagtgtccctatgaagggatgaccaaccacgagacgctgcagcagatcatgcgagggtaccggctgccgcgcccggctgcctgcccggcggaggtctacgtgctcatgctggagtgctggaggagcagccccgaggaacggccctccttcgccacgctgcgggagaagctgcacgccatccacagatgccacccctga

SEQ ID NO: 12 - protein, 488 aa, Homo sapiens
MEPFLRRRLAFLSFFWDKIWPAGGEPDHGTPGSLDPNTDPVPTLPAEPCSPFPQLFLALYDFTARCGGELSVRRGDRLCALEEGGGYIFARRLSGQPSAGLVPITHVAKASPETLSDQPWYFSGVSRTQAQQLLLSPPNEPGAFLIRPSESSLGGYSLSVRAQAKVCHYRVSMAADGSLYLQKGRLFPGLEELLTYYKANWKLIQNPLLQPCMPQKAPRQDVWERPHSEFALGRKLGEGYFGEVWEGLWLGSLPVAIKVIKSANMKLTDLAKEIQTLKGLRHERLIRLHAVCSGGEPVYIVTELMRKGNLQAFLGTPEGRALRLPPLLGFACQVAEGMSYLEEQRVVHRDLAARNVLVDDGLACKVADFGLARLLKDDIYSPSSSSKIPVKWTAPEAANYRVFSQKSDVWSFGVLLHEVFTYGQCPYEGMTNHETLQQIMRGYRLPRPAACPAEVYVLMLECWRSSPEERPSFATLREKLHAIHRCHP

SEQ ID NO: 13 - DNA, 2562 bp, Homo sapiens
  CDS (1)...(2133)
atgctgtccttccagtaccccgacgtgtaccgcgacgagaccgccgtacaggattatcatggtcataaaatttgtgacccttacgcctggcttgaagaccccgacagtgaacagactaaggcctttgtggaggcccagaataagattactgtgccatttcttgagcagtgtcccatcagaggtttatacaaagagagaatgactgaactatatgattatcccaagtatagttgccacttcaagaaaggaaaacggtatttttatttttacaatacaggtttgcagaaccagcgagtattatatgtacaggattccttagagggggaggccagagtgttcctggaccccaacatactgtctgacgatggcacagtggcactccgaggttatgcgttcagcgaagatggtgaatattttgcctatggtctgagtgccagtggctcagactgggtgacaatcaagttcatgaaagttgatggtgccaaagagcttccagatgtgcttgaaagagtcaagttcagctgtatggcctggacccatgatgggaagggaatgttctacaactcataccctcaacaggatggaaaaagtgatggcacagagacatctaccaatctccaccaaaagctctactaccatgtcttgggaaccgatcagtcagaagatattttgtgtgctgagtttcctgatgaacctaaatggatgggtggagctgagttatctgatgatggccgctatgtcttgttatcaataagggaaggatgtgatccagtaaaccgactctggtactgtgacctacagcaggaatccagtggcatcgcgggaatcctgaagtgggtaaaactgattgacaactttgaaggggaatatgactacgtgaccaatgaggggacggtgttcacattcaagacgaatcgccagtctcccaactatcgcgtgatcaacattgacttctgggatcctgaagagtctaagtggaaagtacttgttcctgagcatgagaaagatgtcttagaatggatagcttgtgtcaggtccaacttcttggtcttatgctacctccatgacgtcaagaacattctgcagctccatgacctgactactggtgctctccttaagaccttcccgctcgatgtcggcagcattgtagggtacagcggtcagaagaaggacactgaaatcttctatcagtttacttcctttttatctccaggtatcatttatcactgtgatcttaccaaagaggagctggagccaagagttttccgagaggtgaccgtaaaaggaattgatgcttctgattaccagacagtccagattttctaccctagcaaggatggtacgaagattccaatgttcattgtgcataaaaaaggcataaaattggatggctctcatccagctttcttatatggctatggcggcttcaacatatccatcacacccaactacagtgtttccaggcttatttttgtgagacacatgggtggtatcctggcagtggccaacatcagaggaggtggcgaatatggagagacgtggcataaaggtggtatcttggccaacaaacaaaactgctttgatgactttcagtgtgctgctgagtatctgatcaaggaaggttacacatctcccaagaggctgactattaatggaggttcaaatggaggcctcttagtggctgcttgtgcaaatcagagacctgacctctttggttgtgttattgcccaagttggagtaatggacatgctgaagtttcataaatataccatcggccatgcttggaccactgattatgggtgctcggacagcaaacaacactttgaatggcttgtcaaatactctccattgcataatgtgaagttaccagaagcagatgacatccagtacccgtccatgctgctcctcactgctgaccatgatgaccgcgtggtcccgcttcactccctgaagttcattgccacccttcagtacatcgtgggccgcagcaggaagcaaagcaaccccctgcttatccacgtggacaccaaggcgggccacggggcggggaagcccacagccaaagtgatagaggaagtctcagacatgtttgcgttcatcgcgcggtgcctgaatgtcgactggattccataaacagttttcgtgcttcctcctgacagcgacagaaaacctcaagggctttcccacgttgacaccaagaaaccactgggcataatgcttccccacgggaacattattcctgcactcacaggctacagttgaacagaactgccgtgggaattttatcttttttaggcttctcctttttagcaaggccttggtgtttctttttccaccctgtctaggcacatgtggttttttggtgttttttttaagggcatgttgggataaatagctaaatggcaacaaacacattgtgaatattagattgctgaattaaggatcatagtcgggcatacttatttatatccataacctctatatctttaaataaatgtgagaactgttctcatggagaagacttctttgcaacaataataaatgttatttaagaatgaaaaa

SEQ ID NO: 14 - protein, 710 aa, Homo sapiens
MLSFQYPDVYRDETAVQDYHGHKICDPYAWLEDPDSEQTKAFVEAQNKITVPFLEQCPIRGLYKERMTELYDYPKYSCHFKKGKRYFYFYNTGLQNQRVLYVQDSLEGEARVFLDPNILSDDGTVALRGYAFSEDGEYFAYGLSASGSDWVTIKFMKVDGAKELPDVLERVKFSCMAWTHDGKGMFYNSYPQQDGKSDGTETSTNLHQKLYYHVLGTDQSEDILCAEFPDEPKWMGGAELSDDGRYVLLSIREGCDPVNRLWYCDLQQESSGIAGILKWVKLIDNFEGEYDYVTNEGTVFTFKTNRQSPNYRVINIDFWDPEESKWKVLVPEHEKDVLEWIACVRSNFLVLCYLHDVKNILQLHDLTTGALLKTFPLDVGSIVGYSGQKKDTEIFYQFTSFLSPGIIYHCDLTKEELEPRVFREVTVKGIDASDYQTVQIFYPSKDGTKIPMFIVHKKGIKLDGSHPAFLYGYGGFNISITPNYSVSRLIFVRHMGGILAVANIRGGGEYGETWHKGGILANKQNCFDDFQCAAEYLIKEGYTSPKRLTINGGSNGGLLVAACANQRPDLFGCVIAQVGVMDMLKFHKYTIGHAWTTDYGCSDSKQHFEWLVKYSPLHNVKLPEADDIQYPSMLLLTADHDDRVVPLHSLKFIATLQYIVGRSRKQSNPLLIHVDTKAGHGAGKPTAKVIEEVSDMFAFIARCLNVDWIP

SEQ ID NO: 15 - DNA, 1755 bp, Homo sapiens
  CDS (95)...(1399)
acggagatctcgccggctttacgttcacctcggtgtctgcagcaccctccgcttcctctcctaggcgacgagacccagtggctagaagttcaccatgtctattctcaagatccatgccagggagatctttgactctcgcgggaatcccactgttgaggttgatctcttcacctcaaaaggtctcttcagagctgctgtgcccagtggtgcttcaactggtatctatgaggccctagagctccgggacaatgataagactcgctatatggggaagggtgtctcaaaggctgttgagcacatcaataaaactattgcgcctgccctggttagcaagaaactgaacgtcacagaacaagagaagattgacaaactgatgatcgagatggatggaacagaaaataaatctaagtttggtgcgaacgccattctgggggtgtcccttgccgtctgcaaagctggtgccgttgagaagggggtccccctgtaccgccacatcgctgacttggctggcaactctgaagtcatcctgccagtcccggcgttcaatgtcatcaatggcggttctcatgctggcaacaagctggccatgcaggagttcatgatcctcccagtcggtgcagcaaacttcagggaagccatgcgcattggagcagaggtttaccacaacctgaagaatgtcatcaaggagaaatatgggaaagatgccaccaatgtgggggatgaaggcgggtttgctcccaacatcctggagaataaagaaggcctggagctgctgaagactgctattgggaaagctggctacactgataaggtggtcatcggcatggacgtagcggcctccgagttcttcaggtctgggaagtatgacctggacttcaagtctcccgatgaccccagcaggtacatctcgcctgaccagctggctgacctgtacaagtccttcatcaaggactacccagtggtgtctatcgaagatccctttgaccaggatgactggggagcttggcagaagttcacagccagtgcaggaatccaggtagtgggggatgatctcacagtgaccaacccaaagaggatcgccaaggccgtgaacgagaagtcctgcaactgcctcctgctcaaagtcaaccagattggctccgtgaccgagtctcttcaggcgtgcaagctggcccaggccaatggttggggcgtcatggtgtctcatcgttcgggggagactgaagataccttcatcgctgacctggttgtggggctgtgcactgggcagatcaagactggtgccccttgccgatctgagcgcttggccaagtacaaccagctcctcagaattgaagaggagctgggcagcaaggctaagtttgccggcaggaacttcagaaaccccttggccaagtaagctgtgggcaggcaagccttcggtcacctgttggctacacagacccctcccctcgtgtcagctcaggcagctcgaggcccccgaccaacacttgcaggggtccctgctagttagcgccccaccgccgtggagttcgtaccgcttccttagaacttctacagaagccaagctccctggagccctgttggcagctctagcttttgcagtcgtgtaatgggcccaagtcattgtttttctcgcctcactttccaccaagtgtctagagtcatgtgagcctcgtgtcatctccggggtggccacaggctagatccccggtggttttgtgctcaaaataaaaagcctcagtgacccatgag

SEQ ID NO: 16 - protein, 434 aa, Homo sapiens
MSILKIHAREIFDSRGNPTVEVDLFTSKGLFRAAVPSGASTGIYEALELRDNDKTRYMGKGVSKAVEHINKTIAPALVSKKLNVTEQEKIDKLMIEMDGTENKSKFGANAILGVSLAVCKAGAVEKGVPLYRHIADLAGNSEVILPVPAFNVINGGSHAGNKLAMQEFMILPVGAANFREAMRIGAEVYHNLKNVIKEKYGKDATNVGDEGGFAPNILENKEGLELLKTAIGKAGYTDKVVIGMDVAASEFFRSGKYDLDFKSPDDPSRYISPDQLADLYKSFIKDYPVVSIEDPFDQDDWGAWQKFTASAGIQVVGDDLTVTNPKRIAKAVNEKSCNCLLLKVNQIGSVTESLQACKLAQANGWGVMVSHRSGETEDTFIADLVVGLCTGQIKTGAPCRSERLAKYNQLLRIEEELGSKAKFAGRNFRNPLAK

SEQ ID NO: 17 - DNA, 2131 bp, Homo sapiens
  CDS (488)...(1801)
ctctttataatttagtttccatagaagttatatgtgcatttaaaaaaattcaatgctggagcgaccgtgtctggggagccgagccccgcttctcgctgcggtgagcccggactggggcacgcactgcgcagactccccgctgcagtgggcggagtcccacaggccccgcccctcctcccaccctcgttcagcctgtccagacagaagctggggcccagcggaggtagcagcagacgcctgagagcgaggccgaggccctcagggtttggagaccctgacacacccaccttctcacctgggctctgcgtatcccccagccttgagggaagatgaagcctaaactgatgtaccaggagctgaaggtgcctgcagaggagcccgccaatgagctgcccatgaatgagattgaggcgtggaaggctgcggaaaagaaagcccgctgggtcctgctggtcctcattctggcggttgtgggcttcggagcctgatgactcagctgtttctatgggaatacggcgacttgcatctctttgggcccaaccagcgcccagccccctgctatgacccttgcgaagcagtgctggtggaaagcattcctgagggcctggacttccccaatgcctccacggggaacccttccaccagccaggcctggctgggcctgctcgccggtgcgcacagcagcctggacatcgcctccttctactggaccctcaccaacaatgacacccacacgcaggagccctctgcccagcagggtgaggaggtcctccggcagctgcagaccctggcaccaaagggcgtgaacgtccgcatcgctgtgagcaagcccagcgggccccagccacaggcggacctgcaggctctgctgcagagcggtgcccaggtccgcatggtggacatgcagaagctgacccatggcgtcctgcataccaagttctgggtggtggaccagacccacttctacctgggcagtgccaacatggactggcgttcactgacccaggtcaaggagctgggcgtggtcatgtacaactgcagctgcctggctcgagacctgaccaagatctttgaggcctactggttcctgggccaggcaggcagctccatcccatcaacttggccccggttctatgacacccgctacaaccaagagacaccaatggagatctgcctcaatggaacccctgctctggcctacctggcgagtgcgcccccacccctgtgtccaagtggccgcactccagacctgaaggctctactcaacgtggtggacaatgcccggagtttcatctacgtcgctgtcatgaactacctgcccactctggagttctcccaccctcacaggttctggcctgccattgacgatgggctgcggcgggccacctacgagcgtggcgtcaaggtgcgcctgctcatcagctgctggggacactcggagccatccatgcgggccttcctgctctctctggctgccctgcgtgacaaccatacccactctgacatccaggtgaaactctttgtggtccccgcggatgaggcccaggctcgaatcccatatgcccgtgtcaaccacaacaagtacatggtgactgaacgcgccacctacatcggaacctccaactggtctggcaactacttcacggagacggcgggcacctcgctgctggtgacgcagaatgggaggggcggcctgcggagccagctggaggccattttcctgagggactgggactccccttacattcatgaccttgacacctcagctgacagcgtgggcaacgcctgccgcctgctctgaggcccgatccagtgggcaggccaaggcctgctgggcccccgcggacccaggtgctctgggtcacggtccctgtccccgcacccccgcttctgtctgccccattgtggctcctcaggctctctcccctgctctcccacctctacctccacccccaccggcctgacgctgtggccccgggacccagcagagctgggggagggatcagcccccaaagaaatgggggtgcatgctggcctgccccctggcccacccccactttccagggcaaaaagggcccagggttataataagtaaataacttgtctgtaaaaaaaaaaaaaaaaaaaaaaa

SEQ ID NO: 18 - protein, 437 aa, Homo sapiens
MTQLFLWEYGDLHLFGPNQRPAPCYDPCEAVLVESIPEGLDFPNASTGNPSTSQAWLGLLAGAHSSLDIASFYWTLTNNDTHTQEPSAQQGEEVLRQLQTLAPKGVNVRIAVSKPSGPQPQADLQALLQSGAQVRMVDMQKLTHGVLHTKFWVVDQTHFYLGSANMDWRSLTQVKELGVVMYNCSCLARDLTKIFEAYWFLGQAGSSIPSTWPRFYDTRYNQETPMEICLNGTPALAYLASAPPPLCPSGRTPDLKALLNVVDNARSFIYVAVMNYLPTLEFSHPHRFWPAIDDGLRRATYERGVKVRLLISCWGHSEPSMRAFLLSLAALRDNHTHSDIQVKLFVVPADEAQARIPYARVNHNKYMVTERATYIGTSNWSGNYFTETAGTSLLVTQNGRGGLRSQLEAIFLRDWDSPYIHDLDTSADSVGNACRLL

SEQ ID NO: 19 - DNA, 1181 bp, Homo sapiens
  CDS (13)...(1167)
ggatcctccaacatggccgccactgcctctccgcagccactcgccactgaggatgccgattctgagaatagcagcttctattactatgactacctggatgaagtggccttcatgctctgcaggaaggatgcagtggtgtcctttggcaaagtcttcctcccagtcttctatagcctgatttttgtgttgggcctcagcgggaacctccttcttctcatggtcttgctccgttacgtgcctcgcaggcggatggttgagatctatctgctgaatctggccatctccaaccttctgtttctggtgacactgcccttctggggcatctccgtggcctggcattgggtcttcgggagtttcttgtgcaagatggtgagcactctttatactattaacttttacagtggcatctttttcattagctgcatgagcctggacaagtacctggagatcgttcatgctcagccctaccacaggctgaggacccgggccaagagcctgctccttgctaccatagtatgggctgtgtccctggccgtctccatccctgatatggtctttgtacagacacatgaaaatcccaagggtgtgtggaactgccacgcagatttcggcgggcatgggaccatttggaagctcttcctccgcttccagcagaacctcctagggtttctccttccactccttgccatgatcttcttctactcccgtattggttgtgtcttggtgaggctgaggcccgcaggccagggccgggctttaaaaatagctgcagccttggtggtggccttcttcgtgctatggttcccatacaatctcaccttgtttctgcatacgctgttggacctgcaagtattcgggaactgtgaggtcagccagcatctagactacgcactccaggtaacagagagcatcgccttccttcactgctgcttttcccccatcctgtatgccttctccagtcaccgcttccgccagtacctgaaggctttcctggctgccgtgcttggatggcacctggcacctggcactgcccaggcctcattatccagctgttctgagagcagcatacttactgcccaagaggaaatgactggcatgaatgaccttggagagaggcagtctgagaactaccctaacaaggaggatgtggggaataaatcagcctgagtgaccgcggccgc

SEQ ID NO: 20 - protein, 384 aa, Homo sapiens
MAATASPQPLATEDADSENSSFYYYDYLDEVAFMLCRKDAVVSFGKVFLPVFYSLIFVLGLSGNLLLLMVLLRYVPRRRMVEIYLLNLAISNLLFLVTLPFWGISVAWHWVFGSFLCKMVSTLYTINFYSGIFFISCMSLDKYLEIVHAQPYHRLRTRAKSLLLATIVWAVSLAVSIPDMVFVQTHENPKGVWNCHADFGGHGTIWKLFLRFQQNLLGFLLPLLAMIFFYSRIGCVLVRLRPAGQGRALKIAAALVVAFFVLWFPYNLTLFLHTLLDLQVFGNCEVSQHLDYALQVTESIAFLHCCFSPILYAFSSHRFRQYLKAFLAAVLGWHLAPGTAQASLSSCSESSILTAQEEMTGMNDLGERQSENYPNKEDVGNKSA

SEQ ID NO: 21 - DNA, 3036 bp, Homo sapiens
  CDS (1)...(3036)
atgcacagtatgatcagctcagtggatgtgaagtcagaagttcctgtgggcctggagcccatctcacctttagacctaaggacagacctcaggatgatgatgcccgtggtggaccctgttgtccgtgagaagcaattgcagcaggaattacttcttatccagcagcagcaacaaatccagaagcagcttctgatagcagagtttcagaaacagcatgagaacttgacacggcagcaccaggctcagcttcaggagcatatcaaggaacttctagccataaaacagcaacaagaactcctagaaaaggagcagaaactggagcagcagaggcaagaacaggaagtagagaggcatcgcagagaacagcagcttcctcctctcagaggcaaagatagaggacgagaaagggcagtggcaagtacagaagtaaagcagaagcttcaagagttcctactgagtaaatcagcaacgaaagacactccaactaatggaaaaaatcattccgtgagccgccatcccaagctctggtacacggctgcccaccacacatcattggatcaaagctctccaccccttagtggaacatctccatcctacaagtacacattaccaggagcacaagatgcaaaggatgatttcccccttcgaaaaactgcctctgagcccaacttgaaggtgcggtccaggttaaaacagaaagtggcagagaggagaagcagccccttactcaggcggaaggatggaaatgttgtcacttcattcaagaagcgaatgtttgaggtgacagaatcctcagtcagtagcagttctccaggctctggtcccagttcaccaaacaatgggccaactggaagtgttactgaaaatgagacttcggttttgccccctacccctcatgccgagcaaatggtttcacagcaacgcattctaattcatgaagattccatgaacctgctaagtctttatacctctccttctttgcccaacattaccttggggcttcccgcagtgccatcccagctcaatgcttcgaattcactcaaagaaaagcagaagtgtgagacgcagacgcttaggcaaggtgttcctctgcctgggcagtatggaggcagcatcccggcatcttccagccaccctcatgttactttagagggaaagccacccaacagcagccaccaggctctcctgcagcatttattattgaaagaacaaatgcgacagcaaaagcttcttgtagctggtggagttcccttacatcctcagtctcccttggcaacaaaagagagaatttcacctggcattagaggtacccacaaattgccccgtcacagacccctgaaccgaacccagtctgcacctttgcctcagagcacgttggctcagctggtcattcaacagcaacaccagcaattcttggagaagcagaagcaataccagcagcagatccacatgaacaaactgctttcgaaatctattgaacaactgaagcaaccaggcagtcaccttgaggaagcagaggaagagcttcagggggaccaggcgatgcaggaagacagagcgccctctagtggcaacagcactaggagcgacagcagtgcttgtgtggatgacacactgggacaagttggggctgtgaaggtcaaggaggaaccagtggacagtgatgaagatgctcagatccaggaaatggaatctggggagcaggctgcttttatgcaacagcctttcctggaacccacgcacacacgtgcgctctctgtgcgccaagctccgctggctgcggttggcatggatggattagagaaacaccgtctcgtctccaggactcactcttcccctgctgcctctgttttacctcacccagcaatggaccgccccctccagcctggctctgcaactggaattgcctatgaccccttgatgctgaaacaccagtgcgtttgtggcaattccaccacccaccctgagcatgctggacgaatacagagtatctggtcacgactgcaagaaactgggctgctaaataaatgtgagcgaattcaaggtcgaaaagccagcctggaggaaatacagcttgttcattctgaacatcactcactgttgtatggcaccaaccccctggacggacagaagctggaccccaggatactcctaggtgatgactctcaaaagtttttttcctcattaccttgtggtggacttggggtggacagtgacaccatttggaatgagctacactcgtccggtgctgcacgcatggctgttggctgtgtcatcgagctggcttccaaagtggcctcaggagagctgaagaatgggtttgctgttgtgaggccccctggccatcacgctgaagaatccacagccatggggttctgcttttttaattcagttgcaattaccgccaaatacttgagagaccaactaaatataagcaagatattgattgtagatctggatgttcaccatggaaacggtacccagcaggccttttatgctgaccccagcatcctgtacatttcactccatcgctatgatgaagggaactttttccctggcagtggagccccaaatgaggttggaacaggccttggagaagggtacaatataaatattgcctggacaggtggccttgatcctcccatgggagatgttgagtaccttgaagcattcaggaccatcgtgaagcctgtggccaaagagtttgatccagacatggtcttagtatctgctggatttgatgcattggaaggccacacccctcctctaggagggtacaaagtgacggcaaaatgttttggtcatttgacgaagcaattgatgacattggctgatggacgtgtggtgttggctctagaaggaggacatgatctcacagccatctgtgatgcatcagaagcctgtgtaaatgcccttctaggaaatgagctggagccacttgcagaagatattctccaccaaagcccgaatatgaatgctgttatttctttacagaagatcattgaaattcaaagtatgtctttaaagttctcttaa

SEQ ID NO: 22 - protein, 1011 aa, Homo sapiens
MHSMISSVDVKSEVPVGLEPISPLDLRTDLRMMMPVVDPVVREKQLQQELLLIQQQQQIQKQLLIAEFQKQHENLTRQHQAQLQEHIKELLAIKQQQELLEKEQKLEQQRQEQEVERHRREQQLPPLRGKDRGRERAVASTEVKQKLQEFLLSKSATKDTPTNGKNHSVSRHPKLWYTAAHHTSLDQSSPPLSGTSPSYKYTLPGAQDAKDDFPLRKTASEPNLKVRSRLKQKVAERRSSPLLRRKDGNVVTSFKKRMFEVTESSVSSSSPGSGPSSPNNGPTGSVTENETSVLPPTPHAEQMVSQQRILIHEDSMNLLSLYTSPSLPNITLGLPAVPSQLNASNSLKEKQKCETQTLRQGVPLPGQYGGSIPASSSHPHVTLEGKPPNSSHQALLQHLLLKEQMRQQKLLVAGGVPLHPQSPLATKERISPGIRGTHKLPRHRPLNRTQSAPLPQSTLAQLVIQQQHQQFLEKQKQYQQQIHMNKLLSKSIEQLKQPGSHLEEAEEELQGDQAMQEDRAPSSGNSTRSDSSACVDDTLGQVGAVKVKEEPVDSDEDAQIQEMESGEQAAFMQQPFLEPTHTRALSVRQAPLAAVGMDGLEKHRLVSRTHSSPAASVLPHPAMDRPLQPGSATGIAYDPLMLKHQCVCGNSTTHPEHAGRIQSIWSRLQETGLLNKCERIQGRKASLEEIQLVHSEHHSLLYGTNPLDGQKLDPRILLGDDSQKFFSSLPCGGLGVDSDTIWNELHSSGAARMAVGCVIELASKVASGELKNGFAVVRPPGHHAEESTAMGFCFFNSVAITAKYLRDQLNISKILIVDLDVHHGNGTQQAFYADPSILYISLHRYDEGNFFPGSGAPNEVGTGLGEGYNINIAWTGGLDPPMGDVEYLEAFRTIVKPVAKEFDPDMVLVSAGFDALEGHTPPLGGYKVTAKCFGHLTKQLMTLADGRVVLALEGGHDLTAICDASEACVNALLGNELEPLAEDILHQSPNMNAVISLQKIIEIQSMSLKFS

SEQ ID NO: 23 - DNA, 5549 bp, Homo sapiens
  CDS (1)...(3111)
atggctttgcggggcgccgcgggagcgaccgacaccccggtgtcctcggccgggggagcccccggcggctcagcgtcctcgtcgtccacctcctcgggcggctcggcctcggcgggcgcggggctgtgggccgcgctctatgactacgaggctcgcggcgaggacgagctgagcctgcggcgcggccagctggtggaggtgctgtcgcaggacgccgccgtgtcgggcgacgagggctggtgggcaggccaggtgcagcggcgcctcggcatcttccccgccaactacgtggctccctgccgcccggccgccagccccgcgccgccgccctcgcggcccagctccccggtacacgtcgccttcgagcggctggagctgaaggagctcatcggcgctgggggcttcgggcaggtgtaccgcgccacctggcagggccaggaggtggccgtgaaggcggcgcgccaggacccggagcaggacgcggcggcggctgccgagagcgtgcggcgcgaggctcggctcttcgccatgctgcggcaccccaacatcatcgagctgcgcggcgtgtgcctgcagcagccgcacctctgcctggtgctggagttcgcccgcggcggagcgctcaaccgagcgctggccgctgccaacgccgccccggacccgcgcgcgcccggcccccgccgcgcgcgccgcatccctccgcacgtgctggtcaactgggccgtgcagatagcgcggggcatgctctacctgcatgaggaggccttcgtgcccatcctgcaccgggacctcaagtccagcaacattttgctacttgagaagatagaacatgatgacatctgcaataaaactttgaagattacagattttgggttggcgagggaatggcacaggaccaccaaaatgagcacagcaggcacctatgcctggatggcccccgaagtgatcaagtcttccttgttttctaagggaagcgacatctggagctatggagtgctgctgtgggaactgctcaccggagaagtcccctatcggggcattgatggcctcgccgtggcttatggggtagcagtcaataaactcactttgcccattccatccacctgccctgagccgtttgccaagctcatgaaagaatgctggcaacaagaccctcatattcgtccatcgtttgccttaattctcgaacagttgactgctattgaaggggcagtgatgactgagatgcctcaagaatcttttcattccatgcaagatgactggaaactagaaattcaacaaatgtttgatgagttgagaacaaaggaaaaggagctgcgatcccgggaagaggagctgactcgggcggctctgcagcagaagtctcaggaggagctgctaaagcggcgtgagcagcagctggcagagcgcgagatcgacgtgctggagcgggaacttaacattctgatattccagctaaaccaggagaagcccaaggtaaagaagaggaagggcaagtttaagagaagtcgtttaaagctcaaagatggacatcgaatcagtttaccttcagatttccagcacaagataaccgtgcaggcctctcccaacttggacaaacggcggagcctgaacagcagcagttccagtcccccgagcagccccacaatgatgccccgactccgagccatacagttgacttcagatgaaagcaataaaacttggggaaggaacacagtctttcgacaagaagaatttgaggatgtaaaaaggaattttaagaaaaaaggttgtacctggggaccaaattccattcaaatgaaagatagaacagattgcaaagaaaggataagacctctctccgatggcaacagtccttggtcaactatcttaataaaaaatcagaaaaccatgcccttggcttcattgtttgtggaccagccagggtcctgtgaagagccaaaactttcccctgatggattagaacacagaaaaccaaaacaaataaaattgcctagtcaggcctacattgatctacctcttgggaaagatgctcagagagagaatcctgcagaagctgaaagctgggaggaggcagcctctgcgaatgctgccacagtctccattgagatgactcctacgaatagtctgagtagatccccccagagaaagaaaacggagtcagctctgtatgggtgcaccgtccttctggcatcggtggctctgggactggacctcagagagcttcataaagcacaggctgctgaagaaccgttgcccaaggaagagaagaagaaacgagagggaatcttccagcgggcttccaagtcccgcagaagcgccagtcctcccacaagcctgccatccacctgtggggaggccagcagcccaccctccctgccactgtcaagtgccctgggcatcctctccacaccttctttctccacaaagtgcctgctgcagatggacagtgaagatccactggtggacagtgcacctgtcacttgtgactctgagatgctcactccggatttttgtcccactgccccaggaagtggtcgtgagccagccctcatgccaagacttgacactgattgtagtgtatcaagaaacttgccgtcttccttcctacagcagacatgtgggaatgtaccttactgtgcttcttcaaaacatagaccgtcacatcacagacggaccatgtctgatggaaatccgaccccaactggtgcaactattatctcagccactggagcctctgcactgccactctgcccctcacctgctcctcacagtcatctgccaagggaggtctcacccaagaagcacagcactgtccacatcgtgcctcagcgtcgccctgcctccctgagaagccgctcagatctgcctcaggcttacccacagacagcagtgtctcagctggcacagactgcctgtgtagtgggtcgcccaggaccacatcccacccaattcctcgctgccaaggagagaactaaatcccatgtgccttcattactggatgctgacgtggaaggtcagagcagggactacactgtgccactgtgcagaatgaggagcaaaaccagccggccatctatatatgaactggagaaagaattcctgtcttaaactaagtgccttactgttgtttaagcatttttttaaggtgaacaaatgaacacaatgtatctacctttgaactgtttcatgctgctgtgttttcaaaagctgtggccatgttcctaaattagtaagatatatccagcttctcaaaaaatgtatatgattgctgttagccatgtctattgtttttcctctggattcttttcttataacttggaatacacaaaagtgtaaaacaagagatgtgcaccaatgaaaactatgctgggtcgaattaccttcagcacaatgttaatgttttcgttctcatttatgcctttgtccatttgcacacaacagaaattgtaatgagcttcactatttttgtttctttccttccttttttttcttttttcctttctttcctttttcttgtcttgtttcttgtttttttttcttgtagtttcttttcttaattgtcatttttgcaacaaaaagccaagaaagagctttagtttcttggcaagaataatgtgatattagtaagtaaaggttcttaaaagtctgatgactggaatagatataaagtcctgtttaaactacctaaccttggctgtgggccgataatgcatatgtccagttctcacttaaattatgcaatgatatttctctctgaggaaattatacggaatgtaacttataaaagctttactgaatataagttataagcattttattcattagaactccaaaatagatgttcaaagttcagtccttgccatttgactgagaccacatggtgtgccccttgagtgaggctaatctttaggtttttcctatagaaaacgttcttcctccatcagtagccctttatttgatattcagaagtggaaagctttttcattctccagtagaacttttaaaaattgttacagatacctagctcttcacagatatcatgtattgtaaacagtcatgtgtcttaattttattttctctatttgagtgcataattatcctaataatcccaaagacactgacaactcaaggaacagcagtacagtactattagaagttaagtatgttgttgttatttcacatttcatttaattgtggataaatgttagacatctgttgaaataagctcatatggtggaaacgacaactatattatgaattattttcagaaatggatctttgaatagcagatcaggatttaaataataaaattatctatgaatcacttttatggtcatacatatatgatacaaatccagagttattggtgcagaaatggctacccgagagcttggtaaatttgccttggtttcttatgttaaatgtattgtgcttcccttctgtctctagaatgtggctcttcagaagacagacaattgacatttaaatttttccaaacaatgaaaaactaaattaaaaacattgcttgatatttcatttaaaattgcaccttgcttaaggtttactgaataactgaaatgtcagcaatttaaaataaattcaattgtgtgataaaatatctcacctataatagaagaaaaggaaaatcatattatttggcaattttgcagcattgtggttgcctaacaggtatatccagcagatgagaaacagtatgaaaggattgtattaacatggtaagttttgccctaaggaaaacgatcttgcattctggattcttgcagcaaagtctcaggtacttaatacgttttcttgttttatcatctgttctatgattcggcttcactttgggtggttattgaattatgtaacagagatttggttttcccaaaatgttatcacatttgaaactatgattgctttgtgttcagtccttttggaacacgtagcttccagcttaagggtagaggaaatatatacctaaaatcatcaatacatgaaagaaaaaggatggaaactatgtcctcagttttacttctaccaaaacatccctgtatgtgtgtgcatgtatgttggcgtgtgtgtgtgtgcatgcatattagtaaatgtgtgtttgcatgtgtgtgttggggagtgtatgtgatctgggtgtttgtttatctctgttattattcccctttagctttattttagtcaactctacattatgatgaatttcaaaatgaagctgtattaaaataattgtaatataacaattcaatctcacatgttactgcagatagttaacttttgctgcaatctattgtacatttgcaattttctgtgttagtaaacttagcagaatctggttatttatttttgtgtaggcttaatgttcactgaaagataagtcaattactgttagtaaaaaattaaggtactctcactgcagagatttaaggcctgggcctaatgtgctgtattatgaagccttgtgactgaaaaatatgtttacatacgttgtctatttttttaataaacttttatagctggtctatttgctcagt

SEQ ID NO: 24 - protein, 1036 aa, Homo sapiens
MALRGAAGATDTPVSSAGGAPGGSASSSSTSSGGSASAGAGLWAALYDYEARGEDELSLRRGQLVEVLSQDAAVSGDEGWWAGQVQRRLGIFPANYVAPCRPAASPAPPPSRPSSPVHVAFERLELKELIGAGGFGQVYRATWQGQEVAVKAARQDPEQDAAAAAESVRREARLFAMLRHPNIIELRGVCLQQPHLCLVLEFARGGALNRALAAANAAPDPRAPGPRRARRIPPHVLVNWAVQIARGMLYLHEEAFVPILHRDLKSSNILLLEKIEHDDICNKTLKITDFGLAREWHRTTKMSTAGTYAWMAPEVIKSSLFSKGSDIWSYGVLLWELLTGEVPYRGIDGLAVAYGVAVNKLTLPIPSTCPEPFAKLMKECWQQDPHIRPSFALILEQLTAIEGAVMTEMPQESFHSMQDDWKLEIQQMFDELRTKEKELRSREEELTRAALQQKSQEELLKRREQQLAEREIDVLERELNILIFQLNQEKPKVKKRKGKFKRSRLKLKDGHRISLPSDFQHKITVQASPNLDKRRSLNSSSSSPPSSPTMMPRLRAIQLTSDESNKTWGRNTVFRQEEFEDVKRNFKKKGCTWGPNSIQMKDRTDCKERIRPLSDGNSPWSTILIKNQKTMPLASLFVDQPGSCEEPKLSPDGLEHRKPKQIKLPSQAYIDLPLGKDAQRENPAEAESWEEAASANAATVSIEMTPTNSLSRSPQRKKTESALYGCTVLLASVALGLDLRELHKAQAAEEPLPKEEKKKREGIFQRASKSRRSASPPTSLPSTCGEASSPPSLPLSSALGILSTPSFSTKCLLQMDSEDPLVDSAPVTCDSEMLTPDFCPTAPGSGREPALMPRLDTDCSVSRNLPSSFLQQTCGNVPYCASSKHRPSHHRRTMSDGNPTPTGATIISATGASALPLCPSPAPHSHLPREVSPKKHSTVHIVPQRRPASLRSRSDLPQAYPQTAVSQLAQTACVVGRPGPHPTQFLAAKERTKSHVPSLLDADVEGQSRDYTVPLCRMRSKTSRPSIYELEKEFLS

SEQ ID NO: 25 - DNA, 1799 bp, Homo sapiens
  CDS (359)...(1513)
ggcttagtcacacggcgggggcgccctcggaggcaccggacctcagctctctggacttcccgggaacctggctccccgcgcgtggtcccgggatttagtcgggcgctccccacctctggcagctgcggccccggactccgccagcgctgtcttctctccctcaggtccagccgccgcagggaatgacgccggtgctcctacagccacggctccgggcggggaaggcgagccccacagccggccctgcgacgcccgcctgggcagcaccgataaggagctgaaggcaggagccgccgccacgggcagcgcccccacagcgccagggaccccctggcagcgggagccgcgggtcgaggttatggatccagcgggcggcccccggggcgtgctcccgcggccctgccgcgtgctggtgctgctgaacccgcgcggcggcaagggcaaggccttgcagctcttccggagtcacgtgcagccccttttggctgaggctgaaatctccttcacgctgatgctcactgagcggcggaaccacgcgcgggagctggtgcggtcggaggagctgggccgctgggacgctctggtggtcatgtctggagacgggctgatgcacgaggtggtgaacgggctcatggagcggcctgactgggagaccgccatccagaagcccctgtgtagcctcccagcaggctctggcaacgcgctggcagcttccttgaaccattatgctggctatgagcaggtcaccaatgaagacctcctgaccaactgcacgctattgctgtgccgccggctgctgtcacccatgaacctgctgtctctgcacacggcttcggggctgcgcctcttctctgtgctcagcctggcctggggcttcattgctgatgtggacctagagagtgagaagtatcggcgtctgggggagatgcgcttcactctgggcaccttcctgcgtctggcagccctgcgcacctaccgcggccgactggcctacctccctgtaggaagagtgggttccaagacacctgcctcccccgttgtggtccagcagggcccggtagatgcacaccttgtgccactggaggagccagtgccctctcactggacagtggtgcccgacgaggactttgtgctagtcctggcactgctgcactcgcacctgggcagtgagatgtttgctgcacccatgggccgctgtgcagctggcgtcatgcatctgttctacgtgcgggcgggagtgtctcgtgccatgctgctgcgcctcttcctggccatggagaagggcaggcatatggagtatgaatgcccctacttggtataygtgcccgtggtcgccttccgcttggagcccaaggatgggaaaggtgtgtttgcagtggatggggaattgatggttagcgaggccgtgcagggccaggtgcacccaaactacttctggatggtcagcggttgcgtggagcccccgcccagctggaagccccagcagatgccaccgccagaagagcccttatgacccctgggccgcgytgtgccttagtgtctacttgcaggacccttcctccttccctagggctgcagggcctgtccacagctcctgtgggggtggaggagactcctctggagaagggtgagaaggtggaggctatgctttggggggacaggccagaatgaagtcctgggtcaggagcccagctggctgggcccagctgcctatgtaaggccttctagtttgttytgagacccccaccccacgaaccaaatccaaataaagtgacattcccaaaaaaaaaaaaaaaaaa

SEQ ID NO: 26 - protein, 384 aa, Homo sapiens
MDPAGGPRGVLPRPCRVLVLLNPRGGKGKALQLFRSHVQPLLAEAEISFTLMLTERRNHARELVRSEELGRWDALVVMSGDGLMHEVVNGLMERPDWETAIQKPLCSLPAGSGNALAASLNHYAGYEQVTNEDLLTNCTLLLCRRLLSPMNLLSLHTASGLRLFSVLSLAWGFIADVDLESEKYRRLGEMRFTLGTFLRLAALRTYRGRLAYLPVGRVGSKTPASPVVVQQGPVDAHLVPLEEPVPSHWTVVPDEDFVLVLALLHSHLGSEMFAAPMGRCAAGVMHLFYVRAGVSRAMLLRLFLAMEKGRHMEYECPYLVYVPVVAFRLEPKDGKGVFAVDGELMVSEAVQGQVHPNYFWMVSGCVEPPPSWKPQQMPPPEEPL

SEQ ID NO: 27 - DNA, 2682 bp, Homo sapiens
  CDS (16)...(1314)
attcctgcgccgaggatggagggcctggcagtgcggttgctgcgcggcagcaggctgctaagaagaaatttcctgacttgtttgtcttcttggaagattcctcctcatgtctcaaaatcttcccagtcagaagctctactcaatataacaaataatggaatacactttgctcccctgcaaacatttacagatgaggaaatgatgataaagagttcagttaaaaaatttgctcaggaacaaattgcacctttggtttcaaccatggatgaaaattcgaaaatggagaaatcagtaatacaaggattatttcaacaagggttgatgggtattgaagttgacccagaatatggaggcacaggagcttcttttttatccactgtgctcgtgatagaggaattagccaaagttgatgcatctgtggctgtcttttgtgagatccagaacacattaattaacacactgattagaaaacatggaacagaagaacaaaaggccacctatttgcctcagctcactacagaaaaagtaggaagtttctgcctttcagaggctggagcaggtagtgactcatttgctttgaagaccagagctgataaagagggagattattatgtcctcaatggatcaaagatgtggatcagcagtgctgagcatgcagggctctttctggtgatggcaaatgtagaccctaccattggatataagggaattacctccttcttagtagatcgtgatactccgggccttcatatagggaaacctgaaaacaaattggggctcagagcttcttccacctgcccgttaacattcgaaaatgtcaaggttccagaagccaatatcttgggacaaattggacatggctataagtatgccatagggagtctcaatgaaggtagaataggaattgctgcacagatgctgggactggcgcaaggatgttttgactacactattccatatattaaagaaaggatacaatttggcaaaagactatttgattttcagggcctccaacaccaagtggctcacgtggccacccagctggaagctgcaagattactaacatacaatgctgctaggcttttagaagctggaaagccattcataaaagaagcgtcaatggccaaatactatgcatcagagattgcaggacaaacaacgagtaaatgtatcgagtggatggggggagtaggctacaccaaagattaccctgtggagaaatacttccgagatgcaaagattggtacgatatatgaaggagcttccaacatccagttgaacaccattgcaaagcatatcgatgcagaatactgacgtctataggagtgggacccctccctggtgtcactgctgtaaaattttaaacggttgtgtcttgttgggagtaagtgccttgcgtgggaataaacttccacagcattcgaatattttaatgaagcccttagtcagggtcctggtgttggcctttttggttttctcttttcaggctgtttaacttaggcacaggagatccacttttaaacttgggaaataagcacctgtatttttttccaaaactgtttttaaagctgtatacgcatacatatatatatttttactctgtcttactctgtcacccaggctagagtgcagtggcgcgatctcagctcactgcagccttgacctcctgggttccggtgattctcatgcctcatcctcccaagtagctggaactacaggtgtgcaccaccatgcctggttcatttttgtgtttttagtagagatggggttttaccatattgcccaggctggtcttctggcttctggatatcgcccaccttggcctcccaaagtgctgggattacagggatgagccaccatgcctggctgggtatttatattatcattctagtttcagagtatacagaagtttcatcccatcatttggaaaaataaaggcatctgaagtacaatattacttatagaaatagtttatattcctattaaatcttaatcttgtggcatcagggaaatatttgttacatagtaggcaatttttatccgtactttatagattcaactctaagttgcaagcgaagtcaaaactgatgaaaatttatttagaaaaatctaaaaattctggttttaaatatgagaatcagtggaaaataagggtataattttgtaggtcatatgattgaagaaaatattattttaacaatgtaaagcaatatgatttgttactataattaacctgtataaaagatacattttatggtggtttcagtaggtcattttaaaaaccaatgtgcattagttttcaagtataaggtttaagtaatttggtttaataatcagaaaatattcaatacagtgttggatatctgtcatgcactattttcagttgacaatttctgtattttaattgaatactgtttcttcagtcatggttattattgcactttatcctgaataatagttcagaaattgggttttggttcagtgattctcaagaaaaagatctcttgcccattaagaagtgtatcaaaatctcataaggaatgagggagagaagggggctgtacagtttgaaaaagcatattcaatattaaaatagttttatatttgggaaggcaaaaatgaatctattgttttgcaatataggttatacaggaaaatgcaataaaatatatatctggttgt

SEQ ID NO: 28 - protein, 432 aa, Homo sapiens
MEGLAVRLLRGSRLLRRNFLTCLSSWKIPPHVSKSSQSEALLNITNNGIHFAPLQTFTDEEMMIKSSVKKFAQEQIAPLVSTMDENSKMEKSVIQGLFQQGLMGIEVDPEYGGTGASFLSTVLVIEELAKVDASVAVFCEIQNTLINTLIRKHGTEEQKATYLPQLTTEKVGSFCLSEAGAGSDSFALKTRADKEGDYYVLNGSKMWISSAEHAGLFLVMANVDPTIGYKGITSFLVDRDTPGLHIGKPENKLGLRASSTCPLTFENVKVPEANILGQIGHGYKYAIGSLNEGRIGIAAQMLGLAQGCFDYTIPYIKERIQFGKRLFDFQGLQHQVAHVATQLEAARLLTYNAARLLEAGKPFIKEASMAKYYASEIAGQTTSKCIEWMGGVGYTKDYPVEKYFRDAKIGTIYEGASNIQLNTIAKHIDAEY

SEQ ID NO: 29 - DNA, 3866 bp, Homo sapiens
  CDS (978)...(3551)
ggaattcctttttttttttttttgagatggagtttcactcttgttggccaggctggagtgcaatggcacaatctcagcttactgcaacctccgcctcccgggttcaagcgattctcctgcctcagcctctcaagtagctgggattacaggcatgtgccaccacccctggctaactaatttcttttctatttagtagagatggggtttcaccatgttggtcaggctggtcttgaactcctgacctcaggtgatccacttgccttggcctcccaaagtgctaggattacagccgtgaaactgtgcctggctgattctttttttgttgttggatttttgaaacagggtctcccttggtcgcccaggctggagtgcagtggtgcgatcttggctcactataacctccacctcctggtttcaagtgatcctcccactttagcctcctgagtagctgtgattacaggcgtgcaccaccacacccggctaatttttgtatttttattagagacagggtttcaccatgttggccaggctgttctcaaactcctggactcaagggatccgcctgcctccacttcccaaagtcccgagattacaggtgtgagtcaccatgcctgaccttataattcttaagtcattttttctggtccatttcttccttagggtcctcacaacaaatctgcattaggcggtacaataatccttaacttcatgattcacaaaaggaagatgaagtgattcatgatttagaaaggggaagtagtaagcccactgcacactcctggatgatgatcctaaatccagatacagtaaaaatggggtatgggaaggtagaatacaaaatttggtttaaattaattatctaaatatctaaaaacatttttggatacattgttgatgtgaatgtaagactgtacagacttcctagaaaacagtttgggttccatcttttcatttccccagtgcagttttctgtagaaatggaatccgaggatttaagtggcagagaattgacaattgattccataatgaacaaagtgagagacattaaaaataagtttaaaaatgaagaccttactgatgaactaagcttgaataaaatttctgctgatactacagataactcgggaactgttaaccaaattatgatgatggcaaacaacccagaggactggttgagtttgttgctcaaactagagaaaaacagtgttccgctaagtgatgctcttttaaataaattgattggtcgttacagtcaagcaattgaagcgcttcccccagataaatatggccaaaatgagagttttgctagaattcaagtgagatttgctgaattaaaagctattcaagagccagatgatgcacgtgactactttcaaatggccagagcaaactgcaagaaatttgcttttgttcatatatcttttgcacaatttgaactgtcacaaggtaatgtcaaaaaaagtaaacaacttcttcaaaaagctgtagaacgtggagcagtaccactagaaatgctggaaattgccctgcggaatttaaacctccaaaaaaagcagctgctttcagaggaggaaaagaagaatttatcagcatctacggtattaactgcccaagaatcattttccggttcacttgggcatttacagaataggaacaacagttgtgattccagaggacagactactaaagccaggtttttatatggagagaacatgccaccacaagatgcagaaataggttaccggaattcattgagacaaactaacaaaactaaacagtcatgcccatttggaagagtcccagttaaccttctaaatagcccagattgtgatgtgaagacagatgattcagttgtaccttgttttatgaaaagacaaacctctagatcagaatgccgagatttggttgtgcctggatctaaaccaagtggaaatgattcctgtgaattaagaaatttaaagtctgttcaaaatagtcatttcaaggaacctctggtgtcagatgaaaagagttctgaacttattattactgattcaataaccctgaagaataaaacggaatcaagtcttctagctaaattagaagaaactaaagagtatcaagaaccagaggttccagagagtaaccagaaacagtggcaagctaagagaaagtcagagtgtattaaccagaatcctgctgcatcttcaaatcactggcagattccggagttagcccgaaaagttaatacagagcagaaacataccacttttgagcaacctgtcttttcagtttcaaaacagtcaccaccaatatcaacatctaaatggtttgacccaaaatctatttgtaagacaccaagcagcaataccttggatgattacatgagctgttttagaactccagttgtaaagaatgactttccacctgcttgtcagttgtcaacaccttatggccaacctgcctgtttccagcagcaacagcatcaaatacttgccactccacttcaaaatttacaggttttagcatcttcttcagcaaatgaatgcatttcggttaaaggaagaatttattccatattaaagcagataggaagtggaggttcaagcaaggtatttcaggtgttaaatgaaaagaaacagatatatgctataaaatatgtgaacttagaagaagcagataaccaaactcttgatagttaccggaacgaaatagcttatttgaataaactacaacaacacagtgataagatcatccgactttatgattatgaaatcacggaccagtacatctacatggtaatggagtgtggaaatattgatcttaatagttggcttaaaaagaaaaaatccattgatccatgggaacgcaagagttactggaaaaatatgttagaggcagttcacacaatccatcaacatggcattgttcacagtgatcttaaaccagctaactttctgatagttgatggaatgctaaagctaattgattttgggattgcaaaccaaatgcaaccagatacaacaagtgttgttaaagattctcaggttggcacagttaattatatgccaccagaagcaatcaaagatatgtcttcctccagagagaatgggaaatctaagtcaaagataagccccaaaagtgatgtttggtccttaggatgtattttgtactatatgacttacgggaaaacaccatttcagcagataattaatcagatttctaaattacatgccataattgatcctaatcatgaaattgaatttcccgatattccagagaaagatcttcaagatgtgttaaagtgttgtttaaaaagggacccaaaacagaggatatccattcctgagctcctggctcatccatatgttcaaattcaaactcatccagttaaccaaatggccaagggaaccactgaagaaatgaaatatgttctgggccaacttgttggtctgaattctcctaactccattttgaaagctgctaaaactttatatgaacactatagtggtggtgaaagtcataattcttcatcctccaagacttttgaaaaaaaaaggggaaaaaaatgatttgcagttattcgtaatgtcagataggaggtataaaatatattggactgttatactcttgaatccctgtggaaatctacatttgaagacaacatcactctgaagtgttatcagcaaaaaaaattcagtgagattatctttaaaagaaaactgtaaaaatagcaaccacttatggcactgtatatattgtagacttgttttctctgttttatgctcttgtgtaatctacttgacatcattttactcttggaatagtgggtggatagcaagtatattctaaaaaactttgtaaataaagttttgtggctaaaatga

SEQ ID NO: 30 - protein, 857 aa, Homo sapiens
MESEDLSGRELTIDSIMNKVRDIKNKFKNEDLTDELSLNKISADTTDNSGTVNQIMMMANNPEDWLSLLLKLEKNSVPLSDALLNKLIGRYSQAIEALPPDKYGQNESFARIQVRFAELKAIQEPDDARDYFQMARANCKKFAFVHISFAQFELSQGNVKKSKQLLQKAVERGAVPLEMLEIALRNLNLQKKQLLSEEEKKNLSASTVLTAQESFSGSLGHLQNRNNSCDSRGQTTKARFLYGENMPPQDAEIGYRNSLRQTNKTKQSCPFGRVPVNLLNSPDCDVKTDDSVVPCFMKRQTSRSECRDLVVPGSKPSGNDSCELRNLKSVQNSHFKEPLVSDEKSSELIITDSITLKNKTESSLLAKLEETKEYQEPEVPESNQKQWQAKRKSECINQNPAASSNHWQIPELARKVNTEQKHTTFEQPVFSVSKQSPPISTSKWFDPKSICKTPSSNTLDDYMSCFRTPVVKNDFPPACQLSTPYGQPACFQQQQHQILATPLQNLQVLASSSANECISVKGRIYSILKQIGSGGSSKVFQVLNEKKQIYAIKYVNLEEADNQTLDSYRNEIAYLNKLQQHSDKIIRLYDYEITDQYIYMVMECGNIDLNSWLKKKKSIDPWERKSYWKNMLEAVHTIHQHGIVHSDLKPANFLIVDGMLKLIDFGIANQMQPDTTSVVKDSQVGTVNYMPPEAIKDMSSSRENGKSKSKISPKSDVWSLGCILYYMTYGKTPFQQIINQISKLHAIIDPNHEIEFPDIPEKDLQDVLKCCLKRDPKQRISIPELLAHPYVQIQTHPVNQMAKGTTEEMKYVLGQLVGLNSPNSILKAAKTLYEHYSGGESHNSSSSKTFEKKRGKK

SEQ ID NO: 31 - DNA, 5801 bp, Homo sapiens
  CDS (36)...(4169)
gaattcgcggccgcgtcgaccggcgctgctggaagatggcgagcggccgggacgagcggccgcattgcgtagggcggctcctgttgctcatgtgcctgctgctgctggggagctcggcccgggcggctcacatcaagaaggcggaggcgactaccacaactacgagcgcgggcgcgaggggccgagggcagttcgaccgctactaccacgaagaggagttggagtcggcgctgagggaggcggcggccgcgggcctccccggcctggcccgcctctttagcatcggccgctcggtggaaggccggccgctgtgggtgcttcgcctcaccgccggcctggggtcgctaatccctgagggcgacgcggggcctgacgctgccgggcccgacgctgcggggccgctgctgcccggccggccccaggtgaagctggtgggcaacatgcatggcgacgagaccgtgtcgcgccaggtgttgatctacttggcccgcgagctggcggcgctaccgcccggggacccgcgcctggtccgcctgctcaacaccaccgacgtgtacctgctgcccagcctcaaccccgatggcttcgagcgtgcccgcgagggcgactgtggcttcggcgacggcggcccgtccggggccagcggccgcgacaatagtcgcggccgcgacctcaaccgaagctttcccgaccagtttagcaccggcgaaccccccgccctggacgaggtgcccgaggtgcgcgccctcatcgagtggatccgcaggaacaagtttgtgctttctggaaatctgcatggtggctcagtggtagcaagctatccttttgatgattctccagaacataaggccactggaatctatagcaaaacctcagatgatgaagtatttaaatacttggcaaaagcttatgcttcaaaccaccccataatgaaaactggtgagcctcattgtccaggagatgaagacgagactttcaaagatggaatcacaaacggcgcacattggtatgatgtggaaggtggtatgcaagattacaattatgtgtgggccaactgttttgagatcacattagaactgtcttgttgcaagtacccacctgcttcacagcttcgacaggaatgggagaacaatcgtgagtctttgatcacattgattgaaaaggttcacattggagtgaaaggatttgttaaagattccataacaggatctgggttagagaatgcaaccatctcagtggctggtattaatcataatatcacaacaggcagatttggtgatttctaccgattacttgttcctggaacttacaaccttacagtagttttaactgggtatatgccattgactgttactaatgtagtggtgaaagaaggaccagccacagaggtggatttttctcttaggccaactgtaacttcagtaatccctgacacgacagaggctgtatcaactgctagcacagttgctatacctaatattctttctggaacatcatcctcctgccagccaattcagccaaaggactttcaccaccaccatttccctgatatggaaatcttcttgagaaggtttgccaatgaatatcctaacattacccggctttattccttgggaaaatcagtagagtcaagagaactttatgtgatggagatatctgataatccgggtgtccatgaaccaggtgaaccagaatttaagtacattggaaatatgcatggaaatgaagtggttggaagagaactgctgttgaacctcatagaatacctttgtaagaactttggaacagaccctgaagtcacagatttggttcataacactagaattcaccttatgccatccatgaatcctgatgggtatgaaaagtcccaggaaggagattcaataagtgtaattggcagaaacaacagcaacaactttgacctgaaccgaaatttcccagaccagtttgttcagatcacagatcctacgcaaccagaaactattgctgtaatgagctggatgaagtcctatccatttgtactttcagcaaacctgcatggaggttctttggtggttaactacccttttgatgatgatgaacaaggacttgccacatatagtaaatcaccagatgatgctgtgttccaacaaatagcactttcttattccaaggaaaattcccagatgtttcaaggtagaccttgcaagaatatgtatcctaatgaatattttcctcatggaataacaaatggagctagttggtataatgtgccaggaggaatgcaggactggaactatttacaaacaaattgctttgaagtgactattgaactaggttgtgtgaaatatccacttgagaaagagctgccaaacttttgggaacagaatcgaagatcactaatccagtttatgaaacaggttcatcagggcgtcagaggatttgttctagatgccacagatggcaggggtatattaaatgccaccattagtgttgctgagattaatcacccagtgactacttacaaaactggagattactggcgtctcttggttccaggaacttataaaatcacagcatctgctcgagggtataatccagttaccaagaatgtgactgtcaagagtgaaggcgctattcaggtcaacttcacacttgttcgatcctcaacagattcaaacaatgaatcaaagaaaggaaaaggggctagcagcagcaccaatgatgccagtgatccaactactaaagagtttgaaactttaattaaagacctttcagcggagaatggtttggaaagcctcatgttacgctcctcctcaaatctggctctggctctttatcgataccattcctacaaagacttatcagagtttctgagaggacttgtaatgaactatccacatattacaaatcttaccaatttgggacagagcactgaatatcgtcacatttggtcccttgaaatctccaataagcccaatgtatctgagcctgaagaaccaaagattcgttttgttgctggtatccatggaaatgcgccagttggaactgaactgcttttggctctggcagaatttctctgcctgaactacaaaaagaacccagctgttacccaattggttgacaggactaggattgtgattgtcccttctctaaatccagatgggcgagagagagctcaagagaaagactgtacttcaaaaataggacaaacaaatgctcgtggcaaagatttggatacagacttcacaaataatgcctcccaacctgagaccaaagccatcattgaaaatttgattcaaaaacagaactttagtctttctgttgccttagatggtggttccatgctggtcacatatccatatgacaagccagtacagacagtggaaaataaagagactctgaagcatttggcatctctttatgcaaataatcatccatccatgcacatgggtcagcccagttgcccaaataaatcagatgagaatattccaggaggagtaatgcgtggagcagaatggcatagtcacctgggcagcatgaaggattatagtgtcacctatggccattgtccggaaatcacagtatacacaagctgctgttactttcctagtgctgcacgactcccttccttgtgggcagacaataagagatctcttcttagtatgttagtggaggttcacaagggagttcatggatttgttaaagataagactggaaagccaatctctaaagcagtcattgtacttaatgaaggaataaaggtacaaacaaaagagggaggttatttccatgtactcttagcgccaggtgtccataacattattgccatcgctgatgggtaccagcaacaacattcacaggtctttgtgcatcatgatgcagctagttctgtggtgatagtctttgacacagataaccggatatttggtttgccaagggagcttgtggtaactgtatcaggtgctactatgtcggcattgatcctaacagcttgcattatttggtgcatctgctcaatcaagtctaatagacacaaggatggctttcatcggctcaggcagcatcatgatgagtatgaagatgaaattcgcatgatgtctaccggctccaagaagtccctcctaagccatgagttccaggatgaaacagacactgaagaggaaacattatattctagcaaacattgaaaaacacattttgcatatctcccagcataagtaccaagcaaaattacagttcctcttgggagaacactgcattaagaagagagactctcttgcttcttcaaagagctttgggaaattaaattgctaaatttgtattctctgtgaatttcactggcagttttgaacttcccttccttaaagtactctaaacctttaaaaaaaaatctgatttatgcagcagagatgggacagccactttttctttttaatttaagatgagctatttggagcttatgtaataatggcataaagccaactagaggatgttgtattttgcacatcagatgtttactagtggctttagtatttttctttgttttaaatggccaaaagaatccagaaacattaaggcagggacagcagtcagaatcgacataaagctttaaaaactcaaggttttttcaacctactgaggagtacttttctctagttgttaaatagctggagtttttcttattcaggtttaatggaggttgaattgatttttaaacacatataacagtaggaaatgaataaatgggcttctgcatttggctttctacctgttccaaggctagatcggaactggtagactacgctgtaagcaggatttcactacctctcttaaggtttagcaaacttctaaatagcccattttaagggagaacttactaactttattgtgaaaggtctaaatgcccacttgaatgaagctgagagagagatctagcaaaagctaaaactcatgttgtctatctttgaacttggtaaaaacccacaggtgctgctgcttatatctgtgaagcactagcttattctaggaatgcctgattctttaatattgcctaaatcggaacctttttctatgttgcacacatggttttcagatgacccagccatctacaagatctgaattctactgaaaatatctagaaatgtggaagagacctacttgcacattcttaacctgtatttgaacacaaaatatctatacttcatgctccagcccaagcctataccctgtaatagcatactattattgaaatcgcttgaccggtcttgttcacataggcctctgggagtgatttggttctttgccctaatgtttcatttgacggtctctttttgatcaaccaatttttctaaaagttcagtcgaaagcttttaagtatagcttcctcccttgaaaaaaaatgtaaactatgactgctgagtgataaaacactgtggtgtgaaagtgtcatcttcactgccaatcaggcaaagaccggaaagatttgcattttattatgtctgtcttatcatgcaatggaaatgatgctttttgtaagtatgcatcttaccaatgatgtaacggtttaatacctttgaatgttttaataaccaagttgctgctgaacttatactaaatcaggggaccaaaaaacttgctcttatcttctcaaattgtattctatatccattaatgtatcagttatcccaaagccttcaggtggaggggtttaccaccttcctaggtcgttcaaccaggttttgtgaggaatgcattcaaagtggctttataaaagaagattttctttagcaagaaaaaaaaaaaaaaaaaaaaaaaaaaaa

SEQ ID NO: 32 - protein, 1377 aa, Homo sapiens
MASGRDERPHCVGRLLLLMCLLLLGSSARAAHIKKAEATTTTTSAGARGRGQFDRYYHEEELESALREAAAAGLPGLARLFSIGRSVEGRPLWVLRLTAGLGSLIPEGDAGPDAAGPDAAGPLLPGRPQVKLVGNMHGDETVSRQVLIYLARELAALPPGDPRLVRLLNTTDVYLLPSLNPDGFERAREGDCGFGDGGPSGASGRDNSRGRDLNRSFPDQFSTGEPPALDEVPEVRALIEWIRRNKFVLSGNLHGGSVVASYPFDDSPEHKATGIYSKTSDDEVFKYLAKAYASNHPIMKTGEPHCPGDEDETFKDGITNGAHWYDVEGGMQDYNYVWANCFEITLELSCCKYPPASQLRQEWENNRESLITLIEKVHIGVKGFVKDSITGSGLENATISVAGINHNITTGRFGDFYRLLVPGTYNLTVVLTGYMPLTVTNVVVKEGPATEVDFSLRPTVTSVIPDTTEAVSTASTVAIPNILSGTSSSCQPIQPKDFHHHHFPDMEIFLRRFANEYPNITRLYSLGKSVESRELYVMEISDNPGVHEPGEPEFKYIGNMHGNEVVGRELLLNLIEYLCKNFGTDPEVTDLVHNTRIHLMPSMNPDGYEKSQEGDSISVIGRNNSNNFDLNRNFPDQFVQITDPTQPETIAVMSWMKSYPFVLSANLHGGSLVVNYPFDDDEQGLATYSKSPDDAVFQQIALSYSKENSQMFQGRPCKNMYPNEYFPHGITNGASWYNVPGGMQDWNYLQTNCFEVTIELGCVKYPLEKELPNFWEQNRRSLIQFMKQVHQGVRGFVLDATDGRGILNATISVAEINHPVTTYKTGDYWRLLVPGTYKITASARGYNPVTKNVTVKSEGAIQVNFTLVRSSTDSNNESKKGKGASSSTNDASDPTTKEFETLIKDLSAENGLESLMLRSSSNLALALYRYHSYKDLSEFLRGLVMNYPHITNLTNLGQSTEYRHIWSLEISNKPNVSEPEEPKIRFVAGIHGNAPVGTELLLALAEFLCLNYKKNPAVTQLVDRTRIVIVPSLNPDGRERAQEKDCTSKIGQTNARGKDLDTDFTNNASQPETKAIIENLIQKQNFSLSVALDGGSMLVTYPYDKPVQTVENKETLKHLASLYANNHPSMHMGQPSCPNKSDENIPGGVMRGAEWHSHLGSMKDYSVTYGHCPEITVYTSCCYFPSAARLPSLWADNKRSLLSMLVEVHKGVHGFVKDKTGKPISKAVIVLNEGIKVQTKEGGYFHVLLAPGVHNIIAIADGYQQQHSQVFVHHDAASSVVIVFDTDNRIFGLPRELVVTVSGATMSALILTACIIWCICSIKSNRHKDGFHRLRQHHDEYEDEIRMMSTGSKKSLLSHEFQDETDTEEETLYSSKH

SEQ ID NO: 33 - DNA, 3082 bp, Homo sapiens
  CDS (123)...(2168)
agggagtcgtgtcggcgccaccccggcccccgagcccgcagattgcccaccgaagctcgtgtgtgcacccccgatcccgccagccactcgcccctggcctcgcgggccgtgtctccggcatcatgtgtggtatatttgcttacttaaactaccatgttcctcgaacgagacgagaaatcctggagaccctaatcaaaggccttcagagactggagtacagaggatatgattctgctggtgtgggatttgatggaggcaatgataaagattgggaagccaatgcctgcaaaacccagcttattaagaagaaaggaaaagttaaggcactggatgaagaagttcacaagcaacaagatatggatttggatatagaatttgatgtacaccttggaatagctcatacccgttgggcaacacatggagaacccagtcctgtcaatagccacccccagcgctctgataaaaataatgaatttatcgttattcacaatggaatcatcaccaactacaaagacttgaaaaagtttttggaaagcaaaggctatgacttcgaatctgaaacagacacagagacaattgccaagctcgttaagtatatgtatgacaatcgggaaagtcaagataccagctttactaccttggtggagagagttatccaacaattggaaggtgcttttgcacttgtgtttaaaagtgttcattttcccgggcaagcagttggcacaaggcgaggtagccctctgttgattggtgtacggagtgaacataaactttctactgatcacattcctatactctacagaacaggcaaagacaagaaaggaagctgcaatctctctcgtgtggacagcacaacctgccttttcccggtggaagaaaaagcagtggagtattactttgcttctgatgcaagtgctgtcatagaacacaccaatcgcgtcatctttctggaagatgatgatgttgcagcagtagtggatggacgtctttctatccatcgaattaaacgaactgcaggagatcaccccggacgagctgtgcaaacactccagatggaactccagcagatcatgaagggcaacttcagttcatttatgcagaaggaaatatttgagcagccagagtctgtcgtgaacacaatgagaggaagagtcaactttgatgactatactgtgaatttgggtggtttgaaggatcacataaaggagatccagagatgccggcgtttgattcttattgcttgtggaacaagttaccatgctggtgtagcaacacgtcaagttcttgaggagctgactgagttgcctgtgatggtggaactagcaagtgacttcctggacagaaacacaccagtctttcgagatgatgtttgctttttccttagtcaatcaggtgagacagcagatactttgatgggtcttcgttactgtaaggagagaggagctttaactgtggggatcacaaacacagttggcagttccatatcacgggagacagattgtggagttcatattaatgctggtcctgagattggtgtggccagtacaaaggcttataccagccagtttgtatcccttgtgatgtttgcccttatgatgtgtgatgatcggatctccatgcaagaaagacgcaaagagatcatgcttggattgaaacggctgcctgatttgattaaggaagtactgagcatggatgacgaaattcagaaactagcaacagaactttatcatcagaagtcagttctgataatgggacgaggctatcattatgctacttgtcttgaaggggcactgaaaatcaaagaaattacttatatgcactctgaaggcatccttgctggtgaattgaaacatggccctctggctttggtggataaattgatgcctgtgatcatgatcatcatgagagatcacacttatgccaagtgtcagaatgctcttcagcaagtggttgctcggcaggggcggcctgtggtaatttgtgataaggaggatactgagaccattaagaacacaaaaagaacgatcaaggtgccccactcagtggactgcttgcagggcattctcagcgtgatccctttacagttgctggctttccaccttgctgtgctgagaggctatgatgttgatttcccacggaatcttgccaaatctgtgactgtagagtgaggaatatctatacaaaatgtacgaaactgtatgattaagcaacacaagacaccttttgtatttaaaaccttgatttaaaatatcaccccttgaagcctttttttagtaaatccttatttatatatcagttataattattccactcaatatgtgatttttgtgaagttacctcttacattttcccagtaatttgtggaggactttgaataatggaatctatattggaatctgtatcagaaagattctagctattattttctttaaagaatgctgggtgttgcatttctggaccctccacttcaatctgagaagacaatatgtttctaaaaattggtacttgtttcaccatacttcattcagaccagtgaaagagtagtgcatttaattggagtatctaaagccagtggcagtgtatgctcatacttggacagttagggaagggtttgccaagttttaagagaagatgtgatttattttgaaatttgtttctgttttgtttttaaatcaaactgtaaaacttaaaactgaaaaattttattggtaggatttatatctaagtttggttagccttagtttctcagacttgttgtctattatctgtaggtggaagaaatttaggaagcgaaatattacagtagtgcattggtgggtctcaatccttaacatatttgcacaattttatagcacaaactttaaattcaagctgctttggacaactgacaatatgattttaaatttgaagatgggatgtgtacatgttgggtatcctactactttgtgttttcatctcctaaaagtgttttttatttccttgtatctgtagtcttttattttttaaatgactgctgaatgacatattttatcttgttctttaaaatcacaacacagagctgctattaaattaatattgatat

SEQ ID NO: 34 - protein, 681 aa, Homo sapiens
MCGIFAYLNYHVPRTRREILETLIKGLQRLEYRGYDSAGVGFDGGNDKDWEANACKTQLIKKKGKVKALDEEVHKQQDMDLDIEFDVHLGIAHTRWATHGEPSPVNSHPQRSDKNNEFIVIHNGIITNYKDLKKFLESKGYDFESETDTETIAKLVKYMYDNRESQDTSFTTLVERVIQQLEGAFALVFKSVHFPGQAVGTRRGSPLLIGVRSEHKLSTDHIPILYRTGKDKKGSCNLSRVDSTTCLFPVEEKAVEYYFASDASAVIEHTNRVIFLEDDDVAAVVDGRLSIHRIKRTAGDHPGRAVQTLQMELQQIMKGNFSSFMQKEIFEQPESVVNTMRGRVNFDDYTVNLGGLKDHIKEIQRCRRLILIACGTSYHAGVATRQVLEELTELPVMVELASDFLDRNTPVFRDDVCFFLSQSGETADTLMGLRYCKERGALTVGITNTVGSSISRETDCGVHINAGPEIGVASTKAYTSQFVSLVMFALMMCDDRISMQERRKEIMLGLKRLPDLIKEVLSMDDEIQKLATELYHQKSVLIMGRGYHYATCLEGALKIKEITYMHSEGILAGELKHGPLALVDKLMPVIMIIMRDHTYAKCQNALQQVVARQGRPVVICDKEDTETIKNTKRTIKVPHSVDCLQGILSVIPLQLLAFHLAVLRGYDVDFPRNLAKSVTVE

SEQ ID NO: 35 - DNA, 3224 bp, Homo sapiens
  CDS (65)...(1309)
gtcccacatcccgcatccggcatcccagcggccgggcatgtagcagcggcagcaacggcggaatatgggcgggaaccactcccacaagccccccgtgtttgacgagaatgaggaagtcaactttgaccattttcagattctgcgggccattggtaaagggagttttggaaaggtatgcatcgtgcagaagcgagacactaagaaaatgtatgcaatgaagtacatgaacaagcagaagtgcatcgagagggatgaggttcggaatgttttccgggagctgcagatcatgcaagggctggagcaccccttcctggtcaatctgtggtactccttccaggatgaggaggacatgttcatggtggtggacctgctcctgggaggcgacctgcgctaccatctgcagcagaatgtgcatttcacagaggggactgtgaaactctacatctgtgagctggcactggccctggagtatcttcagaggtaccacatcatccacagagacatcaagccagacaatatcctgctggatgaacacggacatgttcacattacagacttcaacatagcgacggtagtgaaaggagcagaaagggcttcctccatggctggcaccaagccctacatggctccagaagtattccaggtgtacatggacagaggccccggatactcgtaccctgtcgactggtggtccctgggcatcacagcctatgagctgctgcggggctggaggccgtacgaaatccactcggtcacgcccatcgatgaaatcctcaacatgttcaaggtggagcgtgtccactactcctccacgtggtgcaaggggatggtggccctgctgaggaagctcctgaccaaggatcctgagagccgcgtgtccagccttcatgacatacagagcgtgccctacttggccgacatgaactgggacgcggtgttcaagaaggcactgatgcccggctttgtgcccaataaagggaggttgaactgcgatcccacatttgagcttgaagagatgattctagaatccaagccacttcacaaaaagaagaagcgattggcaaagaacagatccagggatggcacaaaggacagctgcccgctgaatggacacctgcagcactgtttggagactgtccgggaggaattcatcatattcaacagagagaagctcaggaggcagcagggacagggcagccagctcttggacaccgacagccgagggggaggccaggcccaaagcaagctccaggacgggtgcaacaacaacctcctcacccacacctgcacccgtggctgcagcagctgagcccacacttgttgctgctcaacaggactgcactcgtctctgccctgcccacccagagcccctctttgtgccctgatggtccctgtctcacccctgaaaacatcagatgcagaaaaagccctggacttggagctgggaagcctgggttctggtcccatctccatgactgattcacgtgtgacctcagacaagtcacgccctctctgtgcctccgttttctgcatctgccaaaggggttaaacacttctgccccacttcaaattacaagattatggggagaacccaattaggtaggaaacatgaaaaacctttgatatttataaaatcatttttacgtgcaaaatataaccttaatatttgaagtgacccccattccccaaagcaatcaaaccgtcatgactttgcaatttggcacatcctagcttgttagagggcacttccgaaaaacacagccctgacagcaaaataaaggtctgatatgttggccccttctatggaaacaacgctgccaaatcctggagcaaaacctgaagtgtcttcatgtgcattctctggcaggccacagtcctgagcttgtaagatggtgcagcatgcagaccagacttgtccccaaggtctcagcgctgcggtctcactcctcccctcatttaagaagactatccttaccttttagtttcagcagtcctcaccaccaccatatccccagtgctgggatggcacacaggtgtccattcagatgagagttgggtcgctgagcattggttactcctgcagagtgtaatcagcaccccatccaactggcccgaaagcccagacctgcagcagaactctccaactctctatcagctttcagggttttctctcctgggaagggtgtaaaatcagcttgtcagattcttcttacagagagtatccaatcggtattggtggagcggctccctatttatacaataggaagcatgggtgcttagaaagtttatttcaggaggaaaatgggttcacacaaaaagcaaactacattctgatctgctcagggagaagcttgcctttgaactggaagatgttgggatgagcagggaaagcttagactttggagtcaggtttgtgttcagaatccagccctgctggctactaactaactgggagaccttaggcaaagcatgcaatcgctctgaatggcagtttcctcatttttaaacagggataataaaactaatattgcaggggagttacagggttaaataagatcctgtgtgtaaccccaagcattggatgactcatagaatggccttttttgtcagcataatcgtcatcattatttagatactttcttccttcactcacccagcaggtcagttttctgtgcaaacaaacctgtttaggattcttccaaatgttcttcctggggtctttgatatttgtttgttacatcctgctgaagttcgactgtgtttttattttttcatccaacttccatttttcactttttacatgattactcaatccttggggctgtccatgtcatctcttagatttcttaaaagacattttaatgtatggttaggttttatatttttattttttaaaaaagaaatagtcagtgttttcctcctttcaaccgagactatttctggattgtgtgctcctcgtcagttgacttgttttgcacacttttctttacttcatgtccccatcaacaaccgtcctgctccccacctcccccaggaaataaggggcctgctcctctccctactgtgaccctggaggctcttaagatgatgatggttttttttattgggctgagttcacgaattaggggcaggagctggaagtcgccctaggaacaccagatttcctggttctgttcaagttggcatttcttgtttggaataaactatttcttggacattccttc

SEQ ID NO: 36 - protein, 414 aa, Homo sapiens
MGGNHSHKPPVFDENEEVNFDHFQILRAIGKGSFGKVCIVQKRDTKKMYAMKYMNKQKCIERDEVRNVFRELQIMQGLEHPFLVNLWYSFQDEEDMFMVVDLLLGGDLRYHLQQNVHFTEGTVKLYICELALALEYLQRYHIIHRDIKPDNILLDEHGHVHITDFNIATVVKGAERASSMAGTKPYMAPEVFQVYMDRGPGYSYPVDWWSLGITAYELLRGWRPYEIHSVTPIDEILNMFKVERVHYSSTWCKGMVALLRKLLTKDPESRVSSLHDIQSVPYLADMNWDAVFKKALMPGFVPNKGRLNCDPTFELEEMILESKPLHKKKKRLAKNRSRDGTKDSCPLNGHLQHCLETVREEFIIFNREKLRRQQGQGSQLLDTDSRGGGQAQSKLQDGCNNNLLTHTCTRGCSS

SEQ ID NO: 37 - DNA, 3860 bp, Homo sapiens
  CDS (17)...(2371)
ccacgcgtccggcgcgatggagggcgacggcgggaccccatgggccctggcgctgctgcgcaccttcgacgcgggcgagttcacgggctgggagaaggtgggctcgggcggcttcgggcaggtgtacaaggtgcgccatgtccactggaagacctggctggccatcaagtgctcgcccagcctgcacgtcgacgacagggagcgcatggagcttttggaagaagccaagaagatggagatggccaagtttcgctacatcctgcctgtgtatggcatctgccgcgaacctgtcggcctggtcatggagtacatggagacgggctccctggaaaagctgctggcttcggagccattgccatgggatctccggttccgaatcatccacgagacggcggtgggcatgaacttcctgcactgcatggccccgccactcctgcacctggacctcaagcccgcgaacatcctgctggatgcccactaccacgtcaagatttctgattttggtctggccaagtgcaacgggctgtcccactcgcatgacctcagcatggatggcctgtttggcacaatcgcctacctccctccagagcgcatcagggagaagagccggctcttcgacaccaagcacgatgtatacagctttgcgatcgtcatctggggcgtgctcacacagaagaagccgtttgcagatgagaagaacatcctgcacatcatggtgaaggtggtgaagggccaccgccccgagctgccgcccgtgtgcagagcccggccgcgcgcctgcagccacctgatacgcctcatgcagcggtgctggcagggggatccgcgagttaggcccaccttccaagaaattacttctgaaaccgaggacctgtgtgaaaagcctgatgacgaagtgaaagaaactgctcatgatctggacgtgaaaagccccccggagcccaggagcgaggtggtgcctgcgaggctcaagcgggcctctgcccccaccttcgataacgactacagcctctccgagcttctctcacagctggactctggagtttcccaggctgtcgagggccccgaggagctcagccgcagctcctctgagtccaagctgccatcgtccggcagtgggaagaggctctcgggggtgtcctcggtggactccgccttctcttccagaggatcactgtcgctgtcctttgagcgggaaccttcaaccagcgatctgggtaccacagacgtccagaagaagaagcttgtggatgccatcgtgtccggggacaccagcaaactgatgaagatcctgcagccgcaggacgtggacctggcactggacagcggtgccagcctgctgcacctggcggtggaggccgggcaagaggagtgcgccaagtggctgctgctcaacaatgccaaccccaacctgagcaaccgtaggggctccaccccgttgcacatggccgtggagaggagggtgcggggtgtcgtggagctcctgctggcacggaagatcagtgtcaacgccaaggatgaggaccagtggacagccctccactttgcagcccagaacggggatgagtctagcacacggctgctgttggagaagaacgcctcggtcaacgaggtggactttgagggccggacgcccatgcacgtggcctgccagcacgggcaggagaatatcgtgcgcatcctgctgcgccgaggcgtggacgtgagcctgcagggcaaggatgcctggctgccactgcactacgctgcctggcagggccacctgcccatcgtcaagctgctggccaagcagccgggggtgagtgtgaacgcccagacgctggatgggaggacgccattgcacctggccgcacagcgcgggcactaccgcgtggcccgcatcctcatcgacctgtgctccgacgtcaacgtctgcagcctgctggcacagacacccctgcacgtggccgcggagacggggcacacgagcactgccaggctgctcctgcatcggggcgctggcaaggaggccgtgacctcagacggctacaccgctctgcacctggctgcccgcaacggacacctggccactgtcaagctgcttgtcgaggagaaggccgatgtgctggcccggggacccctgaaccagacggcgctgcacctggctgccgcccacgggcactcggaggtggtggaggagttggtcagcgccgatgtcattgacctgttcgacgagcaggggctcagcgcgctgcacctggccgcccagggccggcacgcacagacggtggagactctgctcaggcatggggcccacatcaacctgcagagcctcaagttccagggcggccatggccccgccgccacactcctgcggcgaagcaagacctagctggctgcctgcggagaccgggggtccacgtggggctcttgtcctgtcctgtgttcctcgtggggatggaacgatcctgcgtggggccccgttgtggcttacctaaatgttaaccaagcagaggtgacatggtgccatcaggaggcggctgctgctgaccggagtgtcccctccaggtgaagctggctcaggtgcacatgcccgctccatcatcgatctaggcacctgctgtctgaagggaccgtgggtcagaatcatttcgttgtgctcctaatgggtcgctgaggctggtctctcagtgatgaagccccaggcgtggaagcatccactctctcctgaggcgagccaccttgggttgctggagctcaccagtcttgagggaggtgcaggggaaactgtgttttttatcttcatacatgacggtgggcagagaggcctgtcttaaagtttccatggaattgttttataaaatatcttaagagatgaataccttatcagctgttgcttgaaacctgttaaaaatgttcataacattggatagtctagtctctaaatgatggctaagtagtggggttggctttgaaaacaatgttttatgcaacaaggaacgaatggtagcagccagctttgcggggcgtatgtgtggccagctcttaaccattccagtctattacttgggtgagtccttgtggacaaccacacacacgtgcccacatggtactagctgccgttcgtttctcgttgcctaagatgttttggcaactctagagccacaggcctaagagtcattaaaaaattctccctttgtaacctcagtgctggggactgaggcgagccccctcaggtcgctggagtgcaccagtcttggggaagaggtgcaggagaagctgtgttttttatctccacacgcagtatgaagataaaattacatagtattacctagacatagacagtattacctaggtagatgcactgctcacctgcacccttcccagctctcatttttgttaggtgatttgggatagggatagtgttttggggtatggggggagtgtttctgacctgctttgcagacgtgcctccgcacctcagcagtttggggtgtggccccagggcggttcttggatgtaaaagatgtggccatctagcctcgtaacttcactgtcacctgtgtcccatagggtgccttctgaatactgttattagaataagtttgttgcagaacgtgaccctgcgtgcaaacatgtaccgtggcctggtatatgatagagattgatattaatgtaccatgtatgttaatgtgaatctgtgggcaggatacttttccatggcaggaaatatccaagctgttgaaactggctatgttttaatatgcctcattgtgcctttactgttgtgtggactgcgtgagggacaagaagttccatttgatgtcaataaagcaaagtacttgcctacttttttgaagctgaaaaaaaaaaaaaaaagg

SEQ ID NO: 38 - protein, 784 aa, Homo sapiens [sequence omitted]

SEQ ID NO: 39 - DNA, 2153 bp, Homo sapiens
  CDS (122)...(1675)
tcgggaaggaagagtctgtcgcgagcgcgagcttctgagctcgacgggccgagctggcagctggttggtgcttacaccttggccgcagcggcaggtccttccacgtgctttcggcggcgacatggagctggaggagttggggatccgagaggaatgtggcgtgttcgggtgcatcgcctcaggagagtggcccacgcagctggatgtaccgcatgtgatcactctgggactcgtggggctgcagcaccggggtcaggagagtgctggtattgtgactagtgatgggagttcggtgccaacattcaaatcacacaagggaatgggtcttgtaaatcacgtctttactgaagacaatttgaaaaaattatatgtttcaaatcttggaattggacacaccaggtatgccaccacaggaaaatgtgaactagaaaattgtcagcccttcgttgttgaaacacttcatgggaagatagctgtggcacataatggcgaattggtaaatgctgctcgattaaggaaaaagcttctgcgtcatggtattggtctgtctacaagttctgatagtgaaatgattacccagttactggcgtatacccctcctcaggaacaagatgacaccccagactgggtagccaggattaaaaacttgatgaaggaagcacccacagcatactccctgcttataatgcacagagatgttatttatgcagtacgagatccttatggaaatcgtcccttatgcattggtcgtcttattccagtgtctgatataaatgacaaagagaaaaaaacatcagaaacagaaggatgggtggtgtcttcagaatcttgtagcttcttatctattggtgcaagatattaccgtgaagtcttgcctggagaaattgtggaaatatccagacacaatgtccaaactcttgatattatatcaaggtctgaaggaaacccagtggctttttgtatctttgaatatgtttattttgcaagaccagacagtatgttcgaagaccaaatggtttatacagtaagataccgttgtggccagcagctagcgattgaagcacctgtggatgcagatttggttagcactgttccagaatctgctacgcctgctgctcttgcttacgcaggaaagtgtggacttccatatgtggaggtgctgtgtaaaaaccggtatgtagggagaaccttcattcagccaaacatgaggttaagacaacttggtgttgcaaaaaaatttggagtattgtcagacaactttaaaggcaaaagaattgttcttgtagatgattcaattgtcagaggcaataccatctcacctataataaaactgctcaaagaatctggtgcaaaagaggtacacattcgagtagcttcaccaccaattaaatatccatgcttcatgggaataaacattcctacaaaagaagagctcattgccaataaaccagaatttgatcaccttgcagaatatctaggagcaaacagtgttgtgtatctgtcagtagaaggactggtttcatctgtacaagaagggataaagtttaaaaaacagaaagagaaaaagcacgatattatgatccaagaaaatggaaatggtctggaatgttttgaaaagagtggtcattgtacagcttgtctcactggaaaatatcctgtagaattagaatggtagctggtagggttggatgtgtgtagtttcaagatagaaagttggtcaagaagttatagtggtcacacctcatctatttactgttactcagttggtacaatgtaaaatgccatgcttatgtttataagttttgagatttttttttttttctgaaaaggataccaaagtgcgataactgaacatttccaattgcatataatacaacaatatgtggtgttcttttttttacacaagcattggctagcctttttaacctggtcagagaaggcaggtggtcactgacatttcccaagtccatgctttaaagggtttgcaagaagttagggttaaggagaggtgatgccaacaagacaggtgagttaaatataccatttcacacaaagtttgaatagaatacattatacctcataggtgtctagcctctacagttctggctgtagttatgaccttggcttccctgtctaactgtagacaaatcttt

SEQ ID NO: 40 - protein, 517 aa, Homo sapiens
MELEELGIREECGVFGCIASGEWPTQLDVPHVITLGLVGLQHRGQESAGIVTSDGSSVPTFKSHKGMGLVNHVFTEDNLKKLYVSNLGIGHTRYATTGKCELENCQPFVVETLHGKIAVAHNGELVNAARLRKKLLRHGIGLSTSSDSEMITQLLAYTPPQEQDDTPDWVARIKNLMKEAPTAYSLLIMHRDVIYAVRDPYGNRPLCIGRLIPVSDINDKEKKTSETEGWVVSSESCSFLSIGARYYREVLPGEIVEISRHNVQTLDIISRSEGNPVAFCIFEYVYFARPDSMFEDQMVYTVRYRCGQQLAIEAPVDADLVSTVPESATPAALAYAGKCGLPYVEVLCKNRYVGRTFIQPNMRLRQLGVAKKFGVLSDNFKGKRIVLVDDSIVRGNTISPIIKLLKESGAKEVHIRVASPPIKYPCFMGINIPTKEELIANKPEFDHLAEYLGANSVVYLSVEGLVSSVQEGIKFKKQKEKKHDIMIQENGNGLECFEKSGHCTACLTGKYPVELEW

SEQ ID NO: 41 - DNA, 4541 bp, Homo sapiens
  CDS (29)...(4231)
ggatcctctagggtcccagctcgcctcgatggagctcctcccgccgctgcctcagtccttcctgttgctgctgctgttgcctgccaagcccgcggcgggcgaggactggcagtgcccgcgcaccccctacgcggcctctcgcgactttgacgtgaagtacgtggtgcccagcttctccgccggaggcctggtacaggccatggtgacctacgagggcgacagaaatgagagtgctgtgtttgtagccatacgcaatcgcctgcatgtgcttgggcctgacctgaagtctgtccagagcctggccacgggccctgctggagaccctggctgccagacgtgtgcagcctgtggcccaggaccccacggccctcccggtgacacagacacaaaggtgctggtgctggatcccgcgctgcctgcgctggtcagttgtggctccagcctgcagggccgctgcttcctgcatgacctagagccccaagggacagccgtgcatctggcagcgccagcctgcctcttctcagcccaccataaccggcccgatgactgccccgactgtgtggccagcccattgggcacccgtgtaactgtggttgagcaaggccaggcctcctatttctacgtggcatcctcactggacgcagccgtggctggcagcttcagcccacgctcagtgtctatcaggcgtctcaaggctgacgcctcgggattcgcaccgggctttgtggcgttgtcagtgctgcccaagcatcttgtctcctacagtattgaatacgtgcacagcttccacacgggagccttcgtatacttcctgactgtacagccggccagcgtgacagatgatcctagtgccctgcacacacgcctggcacggcttagcgccactgagccagagttgggtgactatcgggagctggtcctcgactgcagatttgctccaaaacgcaggcgccggggggccccagaaggcggacagccctaccctgtgctgcaggtggcccactccgctccagtgggtgcccaacttgccactgagctgagcatcgccgagggccaggaagtactatttggggtctttgtgactggcaaggatggtggtcctggcgtgggccccaactctgtcgtctgtgccttccccattgacctgctggacacactaattgatgagggtgtggagcgctgttgtgaatccccagtccatccaggcctccggcgaggcctcgacttcttccagtcgcccagtttttgccccaacccgcctggcctggaagccctcagccccaacaccagctgccgccacttccctctgctggtcagtagcagcttctcacgtgtggacctattcaatgggctgttgggaccagtacaggtcactgcattgtatgtgacacgccttgacaacgtcacagtggcacacatgggcacaatggatgggcgtatcctgcaggtggagctggtcaggtcactaaactacttgctgtatgtgtccaacttctcactgggtgacagtgggcagcccgtgcagcgggatgtcagtcgtcttggggaccacctactctttgcctctggggaccaggttttccaggtacctatccgaggccctggctgccgccacttcctgacctgtgggcgttgcctaagggcatggcatttcatgggctgtggctggtgtgggaacatgtgcggccagcagaaggagtgtcctggctcctggcaacaggaccactgcccacctaagcttactgagttccacccccacagtggacctctaaggggcagtacaaggctgaccctgtgtggctccaacttctaccttcacccttctggtctggtgcctgagggaacccatcaggtcactgtgggccaaagtccctgccggccactgcccaaggacagctcaaaactcagaccagtgccccggaaagactttgtagaggagtttgagtgtgaactggagcccttgggcacccaggcagtggggcctaccaacgtcagcctcaccgtgactaacatgccaccgggcaagcacttccgggtagacggcacctccgtgctgagaggcttctctttcatggagccagtgctgatagcagtgcaacccctctttggcccacgggcaggaggcacctgtctcactcttgaaggccagagtctgtctgtaggcaccagccgggctgtgctggtcaatgggactgagtgtctgctagcacgggtcagtgaggggcagcttttatgtgccacaccccctggggccacggtggccagtgtcccccttagcctgcaggtggggggtgcccaggtacctggttcctggaccttccagtacagagaagaccctgtcgtgctaagcatcagccccaactgtggctacatcaactcccacatcaccatctgtggccagcatctaacttcagcatggcacttagtgctgtcattccatgacgggcttagggcagtggaaagcaggtgtgagaggcagcttccagagcagcagctgtgccgccttcctgaatatgtggtccgagacccccagggatgggtggcagggaatctgagtgcccgaggggatggagctgctggctttacactgcctggctttcgcttcctacccccaccccatccacccagtgccaacctagttccactgaagcctgaggagcatgccattaagtttgagtatattgggctgggcgctgtggctgactgtgtgggtatcaacgtgaccgtgggtggtgagagctgccagcacgagttccggggggacatggttgtctgccccctgcccccatccctgcagcttggccaggatggtgccccattgcaggtctgcgtagatggtgaatgtcatatcctgggtagagtggtgcggccagggccagatggggtcccacagagcacgctccttggtatcctgctgcctttgctgctgcttgtggctgcactggcgactgcactggtcttcagctactggtggcggaggaagcagctagttcttcctcccaacctgaatgacctggcatccctggaccagactgctggagccacacccctgcctattctgtactcgggctctgactacagaagtggccttgcactccctgccattgatggtctggattccaccacttgtgtccatggagcatccttctccgatagtgaagatgaatcctgtgtgccactgctgcggaaagagtccatccagctaagggacctggactctgcgctcttggctgaggtcaaggatgtgctgattccccatgagcgggtggtcacccacagtgaccgagtcattggcaaaggccactttggagttgtctaccacggagaatacatagaccaggcccagaatcgaatccaatgtgccatcaagtcactaagtcgcatcacagagatgcagcaggtggaggccttcctgcgagaggggctgctcatgcgtggcctgaaccacccgaatgtgctggctctcattggtatcatgttgccacctgagggcctgccccatgtgctgctgccctatatgtgccacggtgacctgctccagttcatccgctcacctcagcggaaccccaccgtgaaggacctcatcagctttggcctgcaggtagcccgcggcatggagtacctggcagagcagaagtttgtgcacagggacctggctgcgcggaactgcatgctggacgagtcattcacagtcaaggtggctgactttggtttggcccgcgacatcctggacagggagtactatagtgttcaacagcatcgccacgctcgcctacctgtgaagtggatggcgctggagagcctgcagacctatagatttaccaccaagtctgatgtgtggtcatttggtgtgctgctgtgggaactgctgacacggggtgccccaccataccgccacattgacccttttgaccttacccacttcctggcccagggtcggcgcctgccccagcctgagtattgccctgattctctgtaccaagtgatgcagcaatgctgggaggcagacccagcagtgcgacccaccttcagagtactagtgggggaggtggagcagatagtgtctgcactgcttggggaccattatgtgcagctgccagcaacctacatgaacttgggccccagcacctcgcatgagatgaatgtgcgtccagaacagccgcagttctcacccatgccagggaatgtacgccggccccggccactctcagagcctcctcggcccacttgacttagttcttgggctggacctgcttagctgccttgagctaaccccaaggctgcctctgggccatgccaggccagagcagtggccctccaccttgttcctgccctttaactttcagaggcaataggtaaatgggcccattaggtccctcactccacagagtgagccagtgagggcagtcctgcaacatgtatttatggagtgcctgctgtggaccctgtcttctgggcacagtggactcagcagtgaccacaccaacactgacccttgaaccaataaaggaacaaatgactattaaagcacaaaaaaaaaa

SEQ ID NO: 42 - protein, 1400 aa, Homo sapiens
MELLPPLPQSFLLLLLLPAKPAAGEDWQCPRTPYAASRDFDVKYVVPSFSAGGLVQAMVTYEGDRNESAVFVAIRNRLHVLGPDLKSVQSLATGPAGDPGCQTCAACGPGPHGPPGDTDTKVLVLDPALPALVSCGSSLQGRCFLHDLEPQGTAVHLAAPACLFSAHHNRPDDCPDCVASPLGTRVTVVEQGQASYFYVASSLDAAVAGSFSPRSVSIRRLKADASGFAPGFVALSVLPKHLVSYSIEYVHSFHTGAFVYFLTVQPASVTDDPSALHTRLARLSATEPELGDYRELVLDCRFAPKRRRRGAPEGGQPYPVLQVAHSAPVGAQLATELSIAEGQEVLFGVFVTGKDGGPGVGPNSVVCAFPIDLLDTLIDEGVERCCESPVHPGLRRGLDFFQSPSFCPNPPGLEALSPNTSCRHFPLLVSSSFSRVDLFNGLLGPVQVTALYVTRLDNVTVAHMGTMDGRILQVELVRSLNYLLYVSNFSLGDSGQPVQRDVSRLGDHLLFASGDQVFQVPIRGPGCRHFLTCGRCLRAWHFMGCGWCGNMCGQQKECPGSWQQDHCPPKLTEFHPHSGPLRGSTRLTLCGSNFYLHPSGLVPEGTHQVTVGQSPCRPLPKDSSKLRPVPRKDFVEEFECELEPLGTQAVGPTNVSLTVTNMPPGKHFRVDGTSVLRGFSFMEPVLIAVQPLFGPRAGGTCLTLEGQSLSVGTSRAVLVNGTECLLARVSEGQLLCATPPGATVASVPLSLQVGGAQVPGSWTFQYREDPVVLSISPNCGYINSHITICGQHLTSAWHLVLSFHDGLRAVESRCERQLPEQQLCRLPEYVVRDPQGWVAGNLSARGDGAAGFTLPGFRFLPPPHPPSANLVPLKPEEHAIKFEYIGLGAVADCVGINVTVGGESCQHEFRGDMVVCPLPPSLQLGQDGAPLQVCVDGECHILGRVVRPGPDGVPQSTLLGILLPLLLLVAALATALVFSYWWRRKQLVLPPNLNDLASLDQTAGATPLPILYSGSDYRSGLALPAIDGLDSTTCVHGASFSDSEDESCVPLLRKESIQLRDLDSALLAEVKDVLIPHERVVTHSDRVIGKGHFGVVYHGEYIDQAQNRIQCAIKSLSRITEMQQVEAFLREGLLMRGLNHPNVLALIGIMLPPEGLPHVLLPYMCHGDLLQFIRSPQRNPTVKDLISFGLQVARGMEYLAEQKFVHRDLAARNCMLDESFTVKVADFGLARDILDREYYSVQQHRHARLPVKWMALESLQTYRFTTKSDVWSFGVLLWELLTRGAPPYRHIDPFDLTHFLAQGRRLPQPEYCPDSLYQVMQQCWEADPAVRPTFRVLVGEVEQIVSALLGDHYVQLPATYMNLGPSTSHEMNVRPEQPQFSPMPGNVRRPRPLSEPPRPT

SEQ ID NO: 43 - DNA, 2915 bp, Homo sapiens
  CDS (56)...(2464)
tggggcggggctgttgggaagtccagcttgggtccctgagagctgtgagaaggagatgcggctgctgctggccctgttgggggtcctgctgagtgtgcctgggcctccagtcttgtccctggaggcctctgaggaagtggagcttgagccctgcctggctcccagcctggagcagcaagagcaggagctgacagtagcccttgggcagcctgtgcgtctgtgctgtgggcgggctgagcgtggtggccactggtacaaggagggcagtcgcctggcacctgctggccgtgtacggggctggaggggccgcctagagattgccagcttcctacctgaggatgctggccgctacctctgcctggcacgaggctccatgatcgtcctgcagaatctcaccttgattacaggtgactccttgacctccagcaacgatgatgaggaccccaagtcccatagggacccctcgaataggcacagttacccccagcaagcaccctactggacacacccccagcgcatggagaagaaactgcatgcagtacctgcggggaacaccgtcaagttccgctgtccagctgcaggcaaccccacgcccaccatccgctggcttaaggatggacaggcctttcatggggagaaccgcattggaggcattcggctgcgccatcagcactggagtctcgtgatggagagcgtggtgccctcggaccgcggcacatacacctgcctggtagagaacgctgtgggcagcatccgctataactacctgctagatgtgctggagcggtccccgcaccggcccatcctgcaggccgggctcccggccaacaccacagccgtggtgggcagcgacgtggagctgctgtgcaaggtgtacagcgatgcccagccccacatccagtggctgaagcacatcgtcatcaacggcagcagcttcggagccgtcggtttcccctatgtgcaagtcctaaagactgcagacatcaatagctcagaggtggaggtcctgtacctgcggaacgtgtcagccgaggacgcaggcgagtacacctgcctcgcaggcaattccatcggcctctcctaccagtctgcctggctcacggtgctgccagaggaggaccccacatggaccgcagcagcgcccgaggccaggtatacggacatcatcctgtacgcgtcgggctccctggccttggctgtgctcctgctgctggccgggctgtatcgagggcaggcgctccacggccggcacccccgcccgcccgccactgtgcagaagctctcccgcttccctctggcccgacagttctccctggagtcaggctcttccggcaagtcaagctcatccctggtacgaggcgtgcgtctctcctccagcggccccgccttgctcgccggcctcgtgagtctagatctacctctcgacccactatgggagttcccccgggacaggctggtgcttgggaagcccctaggcgagggctgctttggccaggtagtacgtgcagaggcctttggcatggaccctgcccggcctgaccaagccagcactgtggccgtcaagatgctcaaagacaacgcctctgacaaggacctggccgacctggtctcggagatggaggtgatgaagctgatcggccgacacaagaacatcatcaacctgcttggtgtctgcacccaggaagggcccctgtacgtgatcgtggagtgcgccgccaagggaaacctgcgggagttcctgcgggcccggcgccccccaggccccgacctcagccccgacggtcctcggagcagtgaggggccgctctccttcccagtcctggtctcctgcgcctaccaggtggcccgaggcatgcagtatctggagtcccggaagtgtatccaccgggacctggctgcccgcaatgtgctggtgactgaggacaatgtgatgaagattgctgactttgggctggcccgcggcgtccaccacattgactactataagaaaaccagcaacggccgcctgcctgtgaagtggatggcgcccgaggccttgtttgaccgggtgtacacacaccagagtgacgtgtggtcttttgggatcctgctatgggagatcttcaccctcgggggctccccgtatcctggcatcccggtggaggagctgttctcgctgctgcgggagggacatcggatggaccgacccccacactgccccccagagctgtacgggctgatgcgtgagtgctggcacgcagcgccctcccagaggcctaccttcaagcagctggtggaggcgctggacaaggtcctgctggccgtctctgaggagtacctcgacctccgcctgaccttcggaccctattccccctctggtggggacgccagcagcacctgctcctccagcgattctgtcttcagccacgaccccctgccattgggatccagctccttccccttcgggtctggggtgcagacatgagcaaggctcaaggctgtgcaggcacataggctggtggccttgggccttggggctcagccacagcctgacacagtgctcgaccttgatagcatggggcccctggcccagagttgctgtgccgtgtccaagggccgtgcccttgcccttggagctgccgtgcctgtgtcctgatggcccaaatgtcagggttctgctcggcttcttggaccaaggcgcttagtccccatcccgggtttggctgagcctggctggagagctgctatgctaaacctcctgcctcccaataccagcaggaggttctgggcctctgaaccccctttccccacacctccccctgctgctgctgccccacgctcttgacgggagcattggcccctgagcccagagaagctggaagcctgccgaaaacaggagcaaatggcgttttataaattatttttttgaaataaaa

SEQ ID NO: 44 - protein, 802 aa, Homo sapiens [sequence omitted]

SEQ ID NO: 45 - DNA, 3927 bp, Homo sapiens
  CDS (253)...(1755)
agcagcgagtccttgcctcccggcggctcaggacgagggcagatctcgttctggggcaagccgttgacactcgctccctgccaccgcccgggctccgtgccgccaagttttcattttccaccttctctgcctccagtcccccagcccctggccgagagaagggtcttaccggccgggattgctggaaacaccaagaggtggtttttgttttttaaaacttctgtttcttgggagggggtgtggcggggcaggatgagcaactccgttcctctgctctgtttctggagcctctgctattgctttgctgcggggagccccgtaccttttggtccagagggacggctggaagataagctccacaaacccaaagctacacagactgaggtcaaaccatctgtgaggtttaacctccgcacctccaaggacccagagcatgaaggatgctacctctccgtcggccacagccagcccttagaagactgcagtttcaacatgacagctaaaacctttttcatcattcacggatggacgatgagcggtatctttgaaaactggctgcacaaactcgtgtcagccctgcacacaagagagaaagacgccaatgtagttgtggttgactggctccccctggcccaccagctttacacggatgcggtcaataataccagggtggtgggacacagcattgccaggatgctcgactggctgcaggagaaggacgatttttctctcgggaatgtccacttgatcggctacagcctcggagcgcacgtggccgggtatgcaggcaacttcgtgaaaggaacggtgggccgaatcacaggtttggatcctgccgggcccatgtttgaaggggccgacatccacaagaggctctctccggacgatgcagattttgtggatgtcctccacacctacacgcgttccttcggcttgagcattggtattcagatgcctgtgggccacattgacatctaccccaatgggggtgacttccagccaggctgtggactcaacgatgtcttgggatcaattgcatatggaacaatcacagaggtggtaaaatgtgagcatgagcgagccgtccacctctttgttgactctctggtgaatcaggacaagccgagttttgccttccagtgcactgactccaatcgcttcaaaaaggggatctgtctgagctgccgcaagaaccgttgtaatagcattggctacaatgccaagaaaatgaggaacaagaggaacagcaaaatgtacctaaaaacccgggcaggcatgcctttcagagtttaccattatcagatgaaaatccatgtcttcagttacaagaacatgggagaaattgagcccaccttttacgtcaccctttatggcactaatgcagattcccagactctgccactggaaatagtggagcggatcgagcagaatgccaccaacaccttcctggtctacaccgaggaggacttgggagacctcttgaagatccagctcacctgggagggggcctctcagtcttggtacaacctgtggaaggagtttcgcagctacctgtctcaaccccgcaaccccggacgggagctgaatatcaggcgcatccgggtgaagtctggggaaacccagcggaaactgacattttgtacagaagaccctgagaacaccagcatatccccaggccgggagctctggtttcgcaagtgtcgggatggctggaggatgaaaaacgaaaccagtcccactgtggagcttccctgagggtgcccgggcaagtcttgccagcaaggcagcaagacttcctgctatccaagcccatggaggaaagttactgctgaggacccacccaatggaaggattcttctcagccttgaccctggagcactgggaacaactggtctcctgtgatggctgggactcctcgcgggaggggactgcgctgctatagctcttgctgcctctcttgaatagctctaactccaaacctctgtccacacctccagagcaccaagtccagatttgtgtgtaagcagctgggtgcctggggcctctcgtgcacactggattggtttctcagttgctgggcgagcctgtactctgcctgacgaggaacgctggctccgaagaggccctgtgtagaaggctgtcagctgctcagcctgctttgagcctcagtgagaagtccttccgacaggagctgactcatgtcaggatggcaggcctggtatcttgctcgggccctagctgttggggttctcatgggttgcactgaccatactgcttacgtcttagccattccgtcctgctccccagctcactctctgaagcacacatcattggctttcctatttttctgttcattttttaattgagcaaatgtctattgaacacttaaaattaattagaatgtggtaatggacatattactgagcctctccatttggaacccagtggagttgggatttctagaccctctttctgtttggatggtgtatgtgtatatgcatggggaaaggcacctggggcctgggggaggctataggatataagcattagggaccctgaggctttaagtggtttctatttcttcttagttattatgtgccaccttcttagttattatgtgccacctcccctatgagtgacgtgtttgatcactagcagaatagcaagcagagtatcattcatgctggggccagaatgatggccggttgccagatataactgctttggagcaaatctcttctgtttagagagatagaagttatgacatatgtaatacacatctgtgtacacagaaaccggcacctgccagacagagctggttctaagatttaatacagtgctttttttcctctttgaaatattttactttaataccagtgccttttcttgttgaacttcttggaaaagccaccaattctagatcttgatttgaattaatacacacaatatctgagacacttacacttttcaaaagatttgtgtatgcattgcctaattagagtagggggagaagggcaactattattatccctattttacaaaactgaggcttagtgaggttcagccacatgcctagacttatatactagttagtggtgcagccagggagaggactcagatttcctggaggcaaagtctatctctgaaactccatgaagacttttgcagccagttcccaccaatatgccccagacgtgagacaaacaaggacttttttttttatatagagccatccataaaatcctaagcccttttattaatgtataaccaggagaacatctgtgccaacggttggactttttatggctgagattcgggaggaagtgtgacaccaagcaggagaggaagaatgattttctttgtacttaggttttctaaggacattgttttaatctgtatcgtgccaaagttgtatcactgttaaacttctgaagacataaccagttgagtcttatttcaagatatgttctcaagccaattgtgtgcttctcttgtttctgtgattgctttctagccaaagcgaagcttgtacaggttgagtatcccttatccaaaatgcttggaaccagaagtgtttcaaattttagattattttcagattttggaatgtttgcatatacataatgagatattttgggaataggacccgagcctaaacacaaaattcattgatgtgtcagttacaccttatccacatagcctgagggtaattttatacgatattttaaatagttgtgtacatgaagcatggtttgtggtaacttatgtgaggggttttcccattttttgtcttgttggtgctcaaaaagttttggattttggagcatttcggattttggatttttggattagggttgctcaacccatattattggctgtacatcctggtcacttctgacttctgtttttactaatggaagctttgca

SEQ ID NO: 46 - protein, 500 aa, Homo sapiens
MSNSVPLLCFWSLCYCFAAGSPVPFGPEGRLEDKLHKPKATQTEVKPSVRFNLRTSKDPEHEGCYLSVGHSQPLEDCSFNMTAKTFFIIHGWTMSGIFENWLHKLVSALHTREKDANVVVVDWLPLAHQLYTDAVNNTRVVGHSIARMLDWLQEKDDFSLGNVHLIGYSLGAHVAGYAGNFVKGTVGRITGLDPAGPMFEGADIHKRLSPDDADFVDVLHTYTRSFGLSIGIQMPVGHIDIYPNGGDFQPGCGLNDVLGSIAYGTITEVVKCEHERAVHLFVDSLVNQDKPSFAFQCTDSNRFKKGICLSCRKNRCNSIGYNAKKMRNKRNSKMYLKTRAGMPFRVYHYQMKIHVFSYKNMGEIEPTFYVTLYGTNADSQTLPLEIVERIEQNATNTFLVYTEEDLGDLLKIQLTWEGASQSWYNLWKEFRSYLSQPRNPGRELNIRRIRVKSGETQRKLTFCTEDPENTSISPGRELWFRKCRDGWRMKNETSPTVELP

SEQ ID NO: 47 - DNA, 4299 bp, Homo sapiens
  CDS (213)...(2576)
gcgggcctccctgtaccctctccttccctcacctctttcctccccacctcccctcttctcggtttcctcccccatccccttgactctcccctcccagccctcgctctctcgctcgccctcagcggggcccccgccatgacggaggcgggtgccggtgccgttgccgccgctgccgtcgcagggggggagtcgggttcccagaaagtagcttgatgagtgtccaaagtagcagtggaagtttggaggggccgccatcttggtcccagctctccacgtctccaaccccgggctcggcggcggcggccaggtccctgctgaatcacacgccgccatccgggaggcccagggaaggtgcaatggatgagcttcatagtctggatccaagaaggcaagagttattggaagctagatttactggagttgcaagtgggagcactggaagtacgggcagttgcagtgttggagctaaagcctcaacaaataacgaaagctctaatcacagttttggaagcttggaatctttaagtgataaagaatcagagacaccggagaagaaacaatcggaatcatccaggggaagaaagagaaaagcagaaaaccagaatgaaagtagtcaggggttccccaacctcccggtcttccagtccttggcctattgggaaatgggtcgtacagcaggaggaaaaagtattgggggacgtggccacaaaattagcgactattttgaataccagggtggaaatggctcaagtccagtaagaggcatacctcctgcaatccgttctcctcaaaattcacattcacattccactccttcctcatctgttcgaccgaatagcccttctcctactgcattagcatttggggaccaccctattgtacaaccaaagcaattatcctttaaaattattcagactgatctcacgatgctgaaattagcagcattagaaagtaataaaatcctagacctggaaaagaaggagggacgtatagatgatttgctcagggccaactgtgatctcagacggcaaatagatgaacaacaaaaattacttgacaaatacaaggaacgattaaataagtgcatatcaatgagcaagaaacttcttatagaaaagagtacacaagaaaagctgtcaagcagagagaagagtatgcaagatcgattacgcctcgggcactttacaacagttagacatggcgcttcatttactgaacaatggacagatggttttgcatttcagaatcttgtgaagcaacaagaatgggtgaatcagcaaagggaagatattgaaaggcaaaggaaacttctagccaaacgcaaacctcccacagctaataattctcaggcaccctctaccaattctgagccaaaacaaaggaaaaacaaagcagtcaatggagctgagaatgatccctttgttagaccaaatttgccacaactgttgacgttggcagaatatcatgaacaggaagaaattttcaaacttagactaggacatctcaaaaaggaagaggcaggaatccaggcagaacttgaacgtttggaaagagtcaggaatcttcacatacgtgagctgaaaagaatacacaatgaagataattcacagttcaaagatcatccaacattaaatgaaagatatttattacttcatctgcttggtagaggtggctttagtgaagtggataaggcttttgacctttctgaacaaagatatgctgctgtgaagatacatcagcttaataaaagctggagagatgagaagaaagaaaactaccacaaacatgcctgcagagagtatagaatacacaaagaactggatcaccccagaatagttaaactctatgattatttctccttggatacagatacgttttgtacagtgttagaatactgtgaaggcaatgacttggatttctatctgaagcaacacaagttaatgtcagagaaagaagctcggtctattgtaatgcagattgtaaatgcattaagatatctcaatgagatcaaaccccctattatacattatgatcttaagccaggaaacatcctactggtagatggaacagcatgtggtgaaatcaaaatcactgattttggtctgtccaagattatggatgatgatagctatggtgtagatggaatggttctaacttcccagggggcaggcacttactggtatttacctcctgagtgttttgtggttggaaaagagccaccaaagatttccaacaaggttgatgtatggtcggttggagtcatcttctatcagtgtctttatggtagaaagccatttggtcacaatcaatctcaacaagacattcttcaagagaatacaatattaaaagccacagaagtccagttccctgtaaaaccggttgtaagcagtgaagccaaggcatttattagacgctgtttggcatatcgaaaagaagatcgatttgatgtgcaccagctggcatgtgacccataccttctcccacacatgcgaagatcaaattcttcaggaaacctacacatggctgggctgacagcatcccctacacccccttcttcaagcataattacttactgactttcctccaagattggcatgatatctttgaatttgcttccagatgcacacttaagtttgagagcatttgagtgtttgttttctttttcttttttttttttttttttttttttacacaagacgtggttaagaactgtttgtgaactgaagttcctcatagtgtcatttgtatgagagaggatcatggacaatgaataaatgcacacttctgactataattttgagcagtgaaggaaggatgactgcctgttacacaggaacaggaataccatgttaagatagaggaaaaaaattttgtttatttgggggaacactgtaaataacgtttataatacttaaatacatttggttgttactagagagttctaatatgaagggtagtttttcattatttaaaaacacatggataaatatgagacatatttctaacatacgaactatagtgcctggatacattcttcagcatttggcagttaatctgctgaaaccaaagtaagaactgaatgacagtgacagttgtgttttatagtaatagaatgtgacagttagaatctttggacaaagttaggctttgtcatttgcctattcagacttttaccaagttggtcctcgagatcacatgtccgttttctttcactggttatattaaagggagagctattatttctaaatactttacacctttgacaagaatgagctgcttgtgttgaaatcagttgaattcactaaattataatattgccagtgttttcaacacgttagaattgataacaggtatttttcttttgttaccaggccttgttcatcaaaacaggtgacagtgagtaaccaaatgcagaccagttctatgcaggataatgataaattcccttctagctctattgtaaattgttgtacagatgtcatatttcaattactaagtttcagcagcttattcttgtacaaatgtttaaaatatggcttttctaattggatattgtattttttttaagtcttcttgaaggcactctaattgctgctaaatgatgttgcttctttgctaaaaaattaaatgacctagaaggtgcaagttgactgtacatcatagatattaaaaagcagacagtcattaacaatcaagatgtaaaagtgatccatgttggacataattgagtttttaaatcagtttattgggttctagggctgtagaacacatagatactagatttttaatttgttcatggttattctacatttctagaaagttcttatcagcaagatggtcccataaggaaatttcttgtggtttgtccagatttgttaaaatgtgaacgttttctaactgcctcgtagggtagaaaccaatatttttcaggatgctgtatttcactcctgtaaggactttttctttattgtcacattcataatgctgatacttacatgtaagttgttcatgttgcagaaaaaggttatacgtaccacggattctctttaatattgtacagttaaactgtatttctgatgttgcaagccattttgttttttcattggacatagacacattgtctctttaaaatgctgctgaaattgtagagagtatagccaaaacagtaataaacaatgacaggtaaaatgtaaagactatgaaaattacattggaagggagctttcaagatggtaggatattgactaactgagctccttcacttaaaaatcagctggataaattccttaagtatacttc

SEQ ID NO: 48 - protein, 787 aa, Homo sapiens
MSVQSSSGSLEGPPSWSQLSTSPTPGSAAAARSLLNHTPPSGRPREGAMDELHSLDPRRQELLEARFTGVASGSTGSTGSCSVGAKASTNNESSNHSFGSLESLSDKESETPEKKQSESSRGRKRKAENQNESSQGFPNLPVFQSLAYWEMGRTAGGKSIGGRGHKISDYFEYQGGNGSSPVRGIPPAIRSPQNSHSHSTPSSSVRPNSPSPTALAFGDHPIVQPKQLSFKIIQTDLTMLKLAALESNKILDLEKKEGRIDDLLRANCDLRRQIDEQQKLLDKYKERLNKCISMSKKLLIEKSTQEKLSSREKSMQDRLRLGHFTTVRHGASFTEQWTDGFAFQNLVKQQEWVNQQREDIERQRKLLAKRKPPTANNSQAPSTNSEPKQRKNKAVNGAENDPFVRPNLPQLLTLAEYHEQEEIFKLRLGHLKKEEAGIQAELERLERVRNLHIRELKRIHNEDNSQFKDHPTLNERYLLLHLLGRGGFSEVDKAFDLSEQRYAAVKIHQLNKSWRDEKKENYHKHACREYRIHKELDHPRIVKLYDYFSLDTDTFCTVLEYCEGNDLDFYLKQHKLMSEKEARSIVMQIVNALRYLNEIKPPIIHYDLKPGNILLVDGTACGEIKITDFGLSKIMDDDSYGVDGMVLTSQGAGTYWYLPPECFVVGKEPPKISNKVDVWSVGVIFYQCLYGRKPFGHNQSQQDILQENTILKATEVQFPVKPVVSSEAKAFIRRCLAYRKEDRFDVHQLACDPYLLPHMRRSNSSGNLHMAGLTASPTPPSSSIITY

SEQ ID NO: 49 - DNA, 3371 bp, Homo sapiens
  CDS (114)...(2333)
aaaaaaccaggaagtgaagtccccgagcacgttagaaagcctgacatggcctgactcgggacagctcagagcagggcagaactggggacactctgggccggccttctgcctgcatggacgctctgaagccaccctgtctctggaggaaccacgagcgagggaagaaggacagggactcgtgtggcaggaagaactcagagccgggaagcccccattcactagaagcactgagagatgcggccccctcgcagggtctgaatttcctgctgctgttcacaaagatgctttttatctttaactttttgttttccccacttccgaccccggcgttgatctgcatcctgacatttggagctgccatcttcttgtggctgatcaccagacctcaacccgtcttacctcttcttgacctgaacaatcagtctgtgggaattgagggaggagcacggaagggggtttcccagaagaacaatgacctaacaagttgctgcttctcagatgccaagactatgtatgaggttttccaaagaggactcgctgtgtctgacaatgggccctgcttgggatatagaaaaccaaaccagccctacagatggctatcttacaaacaggtgtctgatagagcagagtacctgggttcctgtctcttgcataaaggttataaatcatcaccagaccagtttgtcggcatctttgctcagaataggccagagtggatcatctccgaattggcttgttacacgtactctatggtagctgtacctctgtatgacaccttgggaccagaagccatcgtacatattgtcaacaaggctgatatcgccatggtgatctgtgacacaccccaaaaggcattggtgctgatagggaatgtagagaaaggcttcaccccgagcctgaaggtgatcatccttatggacccctttgatgatgacctgaagcaaagaggggagaagagtggaattgagatcttatccctatatgatgctgagaacctaggcaaagagcacttcagaaaacctgtgcctcctagcccagaagacctgagcgtcatctgcttcaccagtgggaccacaggtgaccccaaaggagccatgataacccatcaaaatattgtttcaaatgctgctgcctttctcaaatgtgtggagcatgcttatgagcccactcctgatgatgtggccatatcctacctccctctggctcatatgtttgagaggattgtacaggctgttgtgtacagctgtggagccagagttggattcttccaaggggatattcggttgctggctgacgacatgaagactttgaagcccacattgtttcccgcggtgcctcgactccttaacaggatctacgataaggtacaaaatgaggccaagacacccttgaagaagttcttgttgaagctggctgtttccagtaaattcaaagagcttcaaaagggtatcatcaggcatgatagtttctgggacaagctcatctttgcaaagatccaggacagcctgggcggaagggttcgtgtaattgtcactggagctgcccccatgtccacttcagtcatgacattcttccgggcagcaatgggatgtcaggtgtatgaagcttatggtcaaacagaatgcacaggtggctgtacatttacattacctggggactggacatcaggtcacgttggggtgcccctggcttgcaattacgtgaagctggaagatgtggctgacatgaactactttacagtgaataatgaaggagaggtctgcatcaagggtacaaacgtgttcaaaggatacctgaaggaccctgagaagacacaggaagccctggacagtgatggctggcttcacacaggagacattggtcgctggctcccgaatggaactctgaagatcatcgaccgtaaaaagaacattttcaagctggcccaaggagaatacattgcaccagagaagatagaaaatatctacaacaggagtcaaccagtgttacaaatttttgtacacggggagagcttacggtcatccttagtaggagtggtggttcctgacacagatgtacttccctcatttgcagccaagcttggggtgaagggctcctttgaggaactgtgccaaaaccaagttgtaagggaagccattttagaagacttgcagaaaattgggaaagaaagtggccttaaaacttttgaacaggtcaaagccatttttcttcatccagagccattttccattgaaaatgggctcttgacaccaacattgaaagcaaagcgaggagagctttccaaatactttcggacccaaattgacagcctgtatgagcacatccaggattaggataaggtacttaagtacctgccggcccactgtgcactgcttgtgagaaaatggattaaaaactattcttacatttgttttgcctttcctcctatttttttttaacctgttaaactctaaagccatagcttttgttttatattgagacatataatgtgtaaacttagttcccaaataaatcaatcctgtctttcccatcttcgatgttgctaatattaaggcttcagggctacttttatcaacatgcctggcttcaagatcccagtttatgttctgtgtccttcctcatgatttccaaccttaatactattagtaaccacaagttcaagggtcaaagggaccctctgtgccttcttctttgttttgtgataaacataacttgccaacagtctctatgcttatttacatcttctactgttcaaactaagagatttttaaattctgaaaaactgcttacaattcatgttttctagccactccacaaaccactaaaattttagttttagcctatcactcatgtcaatcatatctatgagacaaatgtctccgatgctcttctgcgtaaattaaattgtgtactgaagggaaaagtttgatcataccaaacatttcctaaactctctagttagatatctgacttgggagtattaaaaattgggtctatgacatattgtccaaaaggaatgctgttcttaaagcattatttacagtaggaactggggagtaaatctgttccctacagtttgctgctgagctggaagctgtgggggaaggagttgacaggtgggcccagtgaacttttccagtaaatgaagcaagcactgaataaaaacctcctgaactgggaacaaagatctacaggcaagcaagatgcccacacaacaggcttattttctgtgaaggaaccaactgatctcccccacccttggattagagttcctgctctaccttacccacagataacacatgttgtttctacttgtaaatgtaaagtctttaaaataaactattacagatacttaaaaaaaaaaaaaaaaa

SEQ ID NO: 50 - protein, 739 aa, Homo sapiens
MDALKPPCLWRNHERGKKDRDSCGRKNSEPGSPHSLEALRDAAPSQGLNFLLLFTKMLFIFNFLFSPLPTPALICILTFGAAIFLWLITRPQPVLPLLDLNNQSVGIEGGARKGVSQKNNDLTSCCFSDAKTMYEVFQRGLAVSDNGPCLGYRKPNQPYRWLSYKQVSDRAEYLGSCLLHKGYKSSPDQFVGIFAQNRPEWIISELACYTYSMVAVPLYDTLGPEAIVHIVNKADIAMVICDTPQKALVLIGNVEKGFTPSLKVIILMDPFDDDLKQRGEKSGIEILSLYDAENLGKEHFRKPVPPSPEDLSVICFTSGTTGDPKGAMITHQNIVSNAAAFLKCVEHAYEPTPDDVAISYLPLAHMFERIVQAVVYSCGARVGFFQGDIRLLADDMKTLKPTLFPAVPRLLNRIYDKVQNEAKTPLKKFLLKLAVSSKFKELQKGIIRHDSFWDKLIFAKIQDSLGGRVRVIVTGAAPMSTSVMTFFRAAMGCQVYEAYGQTECTGGCTFTLPGDWTSGHVGVPLACNYVKLEDVADMNYFTVNNEGEVCIKGTNVFKGYLKDPEKTQEALDSDGWLHTGDIGRWLPNGTLKIIDRKKNIFKLAQGEYIAPEKIENIYNRSQPVLQIFVHGESLRSSLVGVVVPDTDVLPSFAAKLGVKGSFEELCQNQVVREAILEDLQKIGKESGLKTFEQVKAIFLHPEPFSIENGLLTPTLKAKRGELSKYFRTQIDSLYEHIQD

SEQ ID NO: 51 - DNA, 2617 bp, Homo sapiens
  CDS (188)...(1462)
gcgatctgcaggtaggggtgcgcgcgaccgctccccggcgggagccagcgaaggtttccatgtcagaggccgatggagaactgaagattgccacctacgcacaaaggccattgagacacttcgtgtagctggaagacaccaacttcctgacaggagctttatttcatttgggatttcaagtttacagatggtatcttctcaaaagttggaaaaacctatagagatgggcagtagcgaaccccttcccatcgcagatggtgacaggaggaggaagaagaagcggaggggccgggccactgactccttgccaggaaagtttgaagatatgtacaagctgacctctgaattgcttggagagggagcctatgccaaagttcaaggtgccgtgagcctacagaatggcaaagagtatgccgtcaaaatcatcgagaaacaagcagggcacagtcggagtagggtgtttcgagaggtggagacgctgtatcagtgtcagggaaacaagaacattttggagctgattgagttctttgaagatgacacaaggttttacttggtctttgagaaattgcaaggaggttccatcttagcccacatccagaagcaaaagcacttcaatgagcgagaagccagccgagtggtgcgggacgttgctgctgcccttgacttcctgcataccaaaggcattgctcatcgtgatctgaaaccagaaaatatattgtgtgaatctccagaaaaggtgtctccagtgaaaatctgtgactttgacttgggcagtgggatgaaactgaacaactcctgtacccccataaccacaccagagctgaccaccccatgtggctctgcagaatacatggcccctgaggtagtggaggtcttcacggaccaggccacattctacgacaagcgctgtgacctgtggagcctgggcgtggtcctctacatcatgctgagtggctacccacccttcgtgggtcactgcggggccgactgtggctgggaccggggcgaggtctgcagggtgtgccagaacaagctgtttgaaagcatccaggaaggcaagtatgagtttcctgacaaggactgggcacacatctccagtgaagccaaagacctcatctccaagctcctggtgcgagatgcaaagcagagacttagcgccgcccaagttctgcagcacccatgggtgcaggggcaagctccagaaaagggactccccacgccgcaagtcctccagaggaacagcagcacaatggacctgacgctcttcgcagctgaggccatcgcccttaaccgccagctatctcagcacgaagagaacgaactagcagaggagccagaggcactagctgatggcctctgctccatgaagctttcccctccctgcaagtcacgcctggcccggagacgggccctggcccaggcaggccgtggtgaagacaggagcccgcccacagcactctgaaatgctccagtcacaccttataggccctaggcctggccaggcattgtcccctggaaacctgtgtggctaaagtctgctgagcaggcagcagcctctgctctgtggctccattcaggctttttcatctacgaaggccctgaggttcccatcaacccccatttccctagggtcctggaggaaaaagctttttccaaaggggttgtctttgaaaaggaaagcaatcacttctcactttgcataattgcctgcagcaggaacatctcttcactgggctccacctgctcacccgcctgcagatctgggatccagcctgctctcaccgctgtagctgtggcggctggggctgcagcctgcagggagaagcaagaagcatcagttgacagaggctgccgacacgtgcctcttccctctcttctctgtcaccctcctctggcggtccttccaccttcctctgtcctccggatgtcctctttgcccgtcttctcccttggctgagcaaagccatcccctcaattcagggaagggcaaggagccttcctcattcaggaaatcaaatcagtcttccggtctgcagcacggaaaagcacataatctttctttgctgtgactgaaatgtatccctcgtttatcatcccctttgtttgtgattgctgctaaagtcagtagtatcgtttttttaaaaaaaaagtttggtgtttttaaccatctgttccagcaaagatgataccttaaactcccactgcaagcccatgaacttcccagagagtggaacggcttgctcttctttctagaatgtccatgcacttgggttttaatcagcagttccctattattctgattttaagctgttcctgtgatgaacttagagacagcatcggtgtctgctgctgtgtccccaggtcttgtgtgggtggcacagatctgggcagttagatagtgctctgtgcctaaggtgaagccacactagggtgaagcctcacttccctgtttgagcaatgcagtgcctgctgcccgtgtgcatgaaggtacagccattcatataagtggaactattgagttacataaagaaaatagatttgcatttgtcaggcagacgtttatacaacaccacggtgcttttatacattgtgcttattttaataaaactgaaattct

SEQ ID NO: 52 - protein, 424 aa, Homo sapiens
MVSSQKLEKPIEMGSSEPLPIADGDRRRKKKRRGRATDSLPGKFEDMYKLTSELLGEGAYAKVQGAVSLQNGKEYAVKIIEKQAGHSRSRVFREVETLYQCQGNKNILELIEFFEDDTRFYLVFEKLQGGSILAHIQKQKHFNEREASRVVRDVAAALDFLHTKGIAHRDLKPENILCESPEKVSPVKICDFDLGSGMKLNNSCTPITTPELTTPCGSAEYMAPEVVEVFTDQATFYDKRCDLWSLGVVLYIMLSGYPPFVGHCGADCGWDRGEVCRVCQNKLFESIQEGKYEFPDKDWAHISSEAKDLISKLLVRDAKQRLSAAQVLQHPWVQGQAPEKGLPTPQVLQRNSSTMDLTLFAAEAIALNRQLSQHEENELAEEPEALADGLCSMKLSPPCKSRLARRRALAQAGRGEDRSPPTAL

SEQ ID NO: 53 - DNA, 1599 bp, Homo sapiens
  CDS (13)...(1464)
cgaaccagtgcaatgacgatgccagtcaacggggcccacaaggatgctgacctgtggtcctcacatgacaagatgctggcacaacccctcaaagacagtgatgttgaggtttacaacatcattaagaaggagagtaaccggcagagggttggattggagctgattgcctcggagaatttcgccagccgagcagttttggaggccctaggctcttgcttaaataacaaatactctgaggggtacccgggccagagatactatggcgggactgagtttattgatgaactggagaccctctgtcagaagcgagccctgcaggcctataagctggacccacagtgctggggggtcaacgtccagccctactcaggctcccctgcaaactttgctgtgtacactgccctggtggaaccccatgggcgcatcatgggcctggaccttccggatgggggccacctgacccatgggttcatgacagacaagaagaaaatctctgccacgtccatcttctttgaatctatgccctacaaggtgaacccagatactggctacatcaactatgaccagctggaggagaacgcacgcctcttccacccgaagctgatcatcgcaggaaccagctgctactcccgaaacctggaatatgcccggctacggaagattgcagatgagaacggggcgtatctcatggcggacatggctcacatcagcgggctggtggcggctggcgtggtgccctccccatttgaacactgccatgtggtgaccaccaccactcacaagaccctgcgaggctgccgagctggcatgatcttctacaggaaaggagtgaaaagtgtggatcccaagactggcaaagagattctgtacaacctggagtctcttatcaattctgctgtgttccctggcctgcagggaggtccccacaaccacgccattgctggggttgctgtggcactgaagcaagctatgactctggaatttaaagtttatcaacaccaggtggtggccaactgcagggctctgtctgaggccctgacggagctgggctacaaaatagtcacaggtggttctgacaaccatttgatccttgtggatctccgttccaaaggcacagatggtggaagggctgagaaggtgctagaagcctgttctattgcctgcaacaagaacacctgtccaggtgacagaagcgctctgcggcccagtggactgcggctggggaccccagcactgacgtcccgtggacttttggaaaaagacttccaaaaagtagcccactttattcacagagggatagagctgaccctgcagatccagagcgacactggtgtcagagccaccctgaaagagttcaaggagagactggcaggggataagtaccaggcggccgtgcaggctctccgggaggaggttgagagcttcgcctctctcttccctctgcctggcctgcctgacttctaaaggagcgggcccactctggacccacctggcgccacagaggaagctgcctgccggaggacccccacctgagagatggatgagctgctccaaagggggactgttgacactcgggccctttgagggggtttcttttgg

SEQ ID NO: 54 - protein, 483 aa, Homo sapiens
MTMPVNGAHKDADLWSSHDKMLAQPLKDSDVEVYNIIKKESNRQRVGLELIASENFASRAVLEALGSCLNNKYSEGYPGQRYYGGTEFIDELETLCQKRALQAYKLDPQCWGVNVQPYSGSPANFAVYTALVEPHGRIMGLDLPDGGHLTHGFMTDKKKISATSIFFESMPYKVNPDTGYINYDQLEENARLFHPKLIIAGTSCYSRNLEYARLRKIADENGAYLMADMAHISGLVAAGVVPSPFEHCHVVTTTTHKTLRGCRAGMIFYRKGVKSVDPKTGKEILYNLESLINSAVFPGLQGGPHNHAIAGVAVALKQAMTLEFKVYQHQVVANCRALSEALTELGYKIVTGGSDNHLILVDLRSKGTDGGRAEKVLEACSIACNKNTCPGDRSALRPSGLRLGTPALTSRGLLEKDFQKVAHFIHRGIELTLQIQSDTGVRATLKEFKERLAGDKYQAAVQALREEVESFASLFPLPGLPDF

SEQ ID NO: 55 - DNA, 1650 bp, Homo sapiens
  CDS (22)...(1584)
ccttcacacagctctttcaccatgcctggatcacttcctttgaatgcagaagcttgctggccaaaagatgttgggattgttgcccttgagatctattttccttctcaatatgttgatcaagcagagttggaaaaatatgatggtgtagatgctgggaagtataccattggcttgggccaggccaagatgggcttctgcacagatagagaagatattaactctctttgcatgactgtggttcagaatcttatggagagaaataacctttcctatgattgcattgggcggctggaagttggaacagagacaatcatcgacaaatcaaagtctgtgaagactaatttgatgcagctgtttgaagagtctgggaatacagatatagaaggaatcgacacaactaatgcatgctatggaggcacagctgctgtcttcaatgctgttaactggattgagtccagctcttgggatggacggtatgccctggtagttgcaggagatattgctgtatatgccacaggaaatgctagacctacaggtggagttggagcagtagctctgctaattgggccaaatgctcctttaatttttgaacgagggcttcgtgggacacatatgcaacatgcctatgatttttacaagcctgatatgctatctgaatatcctatagtagatgggaaactctccatacagtgctacctcagtgcattagaccgctgctattctgtctactgcaaaaagatccatgcccagtggcagaaagagggaaatgataaagattttaccttgaatgattttggcttcatgatctttcactcaccatattgtaaactggttcagaaatctctagctcggatgttgctgaatgacttccttaatgaccagaatagagataaaaatagtatctatagtggcctggaagcctttggggatgttaaattagaagacacctactttgatagagatgtggagaaggcatttatgaaggctagctctgaactcttcagtcagaaaacaaaggcatctttacttgtatcaaatcaaaatggaaatatgtacacatcttcagtatatggttcccttgcatctgttctagcacagtactcacctcagcaattagcagggaagagaattggagtgttttcttatggttctggtttggctgccactctgtactctcttaaagtcacacaagatgctacaccggggtctgctcttgataaaataacagcaagtttatgtgatcttaaatcaaggcttgattcaagaactggtgtggcaccagatgtcttcgctgaaaacatgaagctcagagaggacacccatcatttggtcaactatattccccagggttcaatagattcactctttgaaggaacgtggtacttagttagggtggatgaaaagcacagaagaacttacgctcggcgtcccactccaaatgatgacactttggatgaaggagtaggacttgtgcattcaaacatagcaactgagcatattccaagccctgccaagaaagtaccaagactccctgccacagcagcagaacctgaagcagctgtcattagtaatggggaacattaagatactctgtgaggtgcaagacttcagggtggggtgggcatggggtgggggtatgggaacagttgg

SEQ ID NO: 56 - protein, 520 aa, Homo sapiens
MPGSLPLNAEACWPKDVGIVALEIYFPSQYVDQAELEKYDGVDAGKYTIGLGQAKMGFCTDREDINSLCMTVVQNLMERNNLSYDCIGRLEVGTETIIDKSKSVKTNLMQLFEESGNTDIEGIDTTNACYGGTAAVFNAVNWIESSSWDGRYALVVAGDIAVYATGNARPTGGVGAVALLIGPNAPLIFERGLRGTHMQHAYDFYKPDMLSEYPIVDGKLSIQCYLSALDRCYSVYCKKIHAQWQKEGNDKDFTLNDFGFMIFHSPYCKLVQKSLARMLLNDFLNDQNRDKNSIYSGLEAFGDVKLEDTYFDRDVEKAFMKASSELFSQKTKASLLVSNQNGNMYTSSVYGSLASVLAQYSPQQLAGKRIGVFSYGSGLAATLYSLKVTQDATPGSALDKITASLCDLKSRLDSRTGVAPDVFAENMKLREDTHHLVNYIPQGSIDSLFEGTWYLVRVDEKHRRTYARRPTPNDDTLDEGVGLVHSNIATEHIPSPAKKVPRLPATAAEPEAAVISNGEH

SEQ ID NO: 57 - DNA, 2051 bp, Homo sapiens
  CDS (83)...(1420)
gggcggggttcctggtccctggagctccgcacttggcggcgcaacctgcgtgaggcagcgcgactctggcgactggccggccatgccttcccgggctgaggactatgaagtgttgtacaccattggcacaggctcctacggccgctgccagaagatccggaggaagagtgatggcaagatattagtttggaaagaacttgactatggctccatgacagaagctgagaaacagatgcttgtttctgaagtgaatttgcttcgtgaactgaaacatccaaacatcgttcgttactatgatcggattattgaccggaccaatacaacactgtacattgtaatggaatattgtgaaggaggggatctggctagtgtaattacaaagggaaccaaggaaaggcaatacttagatgaagagtttgttcttcgagtgatgactcagttgactctggccctgaaggaatgccacagacgaagtgatggtggtcataccgtattgcatcgggatctgaaaccagccaatgttttcctggatggcaagcaaaacgtcaagcttggagactttgggctagctagaatattaaaccacgacacgagttttgcaaaaacatttgttggcacaccttattacatgtctcctgaacaaatgaatcgcatgtcctacaatgagaaatcagatatctggtcattgggctgcttgctgtatgagttatgtgcattaatgcctccatttacagcttttagccagaaagaactcgctgggaaaatcagagaaggcaaattcaggcgaattccataccgttactctgatgaattgaatgaaattattacgaggatgttaaacttaaaggattaccatcgaccttctgttgaagaaattcttgagaaccctttaatagcagatttggttgcagacgagcaaagaagaaatcttgagagaagagggcgacaattaggagagccagaaaaatcgcaggattccagccctgtattgagtgagctgaaactgaaggaaattcagttacaggagcgagagcgagctctcaaagcaagagaagaaagattggagcagaaagaacaggagctttgtgttcgtgagagactagcagaggacaaactggctagagcagaaaatctgttgaagaactacagcttgctaaaggaacggaagttcctgtctctggcaagtaatccagaacttcttaatcttccatcctcagtaattaagaagaaagttcatttcagtggggaaagtaaagagaacatcatgaggagtgagaattctgagagtcagctcacatctaagtccaagtgcaaggacctgaagaaaaggcttcacgctgcccagctgcgggctcaagccctgtcagatattgagaaaaattaccaactgaaaagcagacagatcctgggcatgcgctagccaggtagagagacacagagctgtgtacaggatgtaatattaccaacctttaaagactgatattcaaatgctgtagtgttgaatacttggttccatgagccatgcctttctgtatagtacacatgatatttcggaattggttttactgttcttcagcaactattgtacaaaatgttcacatttaatttttctttcttcttttaagaacatattataaaaagaatactttcttggttgggcttttaatcctgtgtgtgattactagtaggaacatgagatgtgacattctaaatcttgggagaaaaaataatgttagaaaaaaaatatttatgcaggaaggtagcactcactgaatagttttaaatgactgagtggtatgcttacaattgtcatgtctagatttaaattttaagtctgagattttaaatgtttttgagcttagaaaacccagttagatgcaatttggtcattaataccatgacatcttgcttataaatattccattgctctgtagttcaaatctgttagctttgtgaaaattcatcactgtgatgtttgtattctttttttttttctgtttaacagatatgagctgtctgtcatttacctacttctttcccactaaataaaa

SEQ ID NO: 58 - protein, 445 aa, Homo sapiens
MPSRAEDYEVLYTIGTGSYGRCQKIRRKSDGKILVWKELDYGSMTEAEKQMLVSEVNLLRELKHPNIVRYYDRIIDRTNTTLYIVMEYCEGGDLASVITKGTKERQYLDEEFVLRVMTQLTLALKECHRRSDGGHTVLHRDLKPANVFLDGKQNVKLGDFGLARILNHDTSFAKTFVGTPYYMSPEQMNRMSYNEKSDIWSLGCLLYELCALMPPFTAFSQKELAGKIREGKFRRIPYRYSDELNEIITRMLNLKDYHRPSVEEILENPLIADLVADEQRRNLERRGRQLGEPEKSQDSSPVLSELKLKEIQLQERERALKAREERLEQKEQELCVRERLAEDKLARAENLLKNYSLLKERKFLSLASNPELLNLPSSVIKKKVHFSGESKENIMRSENSESQLTSKSKCKDLKKRLHAAQLRAQALSDIEKNYQLKSRQILGMR

SEQ ID NO: 59 - DNA, 1548 bp, Homo sapiens
  CDS (115)...(1203)
  misc_feature (1)...(1548): n = A,T,C or G
tacgcctgccgtaccggtccggaattcccgggtcgacgatttcgtgcctggcgcgctgcggcgctcgctcacccgctcccgaggaagggcagtgggccccgccgccgcctcccaatggcgaggctgcgggattgcctgccccgcctgatgctcacgctccggtccctgctcttctggtccctggtctactgctactgcgggctctgcgcctccatccacctgctcaaacttttgtggagcctcggcaaggggccggcgcagaccttccggcggcccgcccgggagcaccctcccgcgtgcctgagcgacccctccttgggcacccactgctacgtgcggatcaaggattcagggttaagatttcactatgttgctgctggagaaagaggcaaaccacttatgctgctgcttcatggatttccagaattctggtattcttggcgttaccaactgagagaatttaaaagtgaatatcgagttgtagcactggatttgagaggttatggagaaacagatgctcccattcatcgacagaattataaattggattgtctaattacagatataaaggatattttagattctttagggtatagcaaatgtgttcttattggccatgactgggggggcatgattgcttggctaattgccatctgttatcctgaaatggtgatgaagcttattgttattaacttccctcatccaaatgtatttacagaatatattttacgacaccctgctcagctgttgaaatccagttattattacttcttccaaataccatggttcccagaatttatgttctcaataaatgatttcaaggttttgaaacatctgtttaccagtcacagcactggcattggaagaaaaggatgccaattaacaacagaggatcttgaagcttatatttatgtcttttctcagcctggagcattaagtggcccaattaaccattaccgaaatatcttcagctgcctgcctctcaaacatcacatggtgaccactccaacactactactgtggggagagaatgacgcattcatggaggttgagatggctgaagtcacaaagatttatgttaaaaactatttcaggctaactattttgtcagaagccagtcattggcttcagcaagaccaacctgacatagtgaacaaattgatatggacatttctaaaagaagaaacaagaaaaaaagattgacttttctttatcttctatgaagggtctgtaatgaaatctctaaataatttttaaaaattgttcatcaacttctttatgttttattagaaaaaaanctgttttaatgtgctttatcataaataaatatcctgacaaatggtattgaaaaaaatctgagatcatgtgaacatataatacaatgttgattttcttctggtgtattttgcacagacaagcatctgccttaaaatatatacacttgtacaaaaaggaagtttggagtaagtgcttccattttggtttcttgctyytytttactctgttaacatatggtgccttttacaaatgtatattaaaaaaaaaaaa

SEQ ID NO: 60 - protein, 362 aa, Homo sapiens
MARLRDCLPRLMLTLRSLLFWSLVYCYCGLCASIHLLKLLWSLGKGPAQTFRRPAREHPPACLSDPSLGTHCYVRIKDSGLRFHYVAAGERGKPLMLLLHGFPEFWYSWRYQLREFKSEYRVVALDLRGYGETDAPIHRQNYKLDCLITDIKDILDSLGYSKCVLIGHDWGGMIAWLIAICYPEMVMKLIVINFPHPNVFTEYILRHPAQLLKSSYYYFFQIPWFPEFMFSINDFKVLKHLFTSHSTGIGRKGCQLTTEDLEAYIYVFSQPGALSGPINHYRNIFSCLPLKHHMVTTPTLLLWGENDAFMEVEMAEVTKIYVKNYFRLTILSEASHWLQQDQPDIVNKLIWTFLKEETRKKD

SEQ ID NO: 61 - DNA, 1418 bp, Homo sapiens
  CDS (110)...(979)
aactgtgcgaaccagacccggcagccttgctcagttcagcatagcggagcggatccgatcggatcggagcacaccggagcaggctcatcgagaaggcgtctgcgagaccatggagaacggatacacctatgaagattataagaacactgcagaatggcttctgtctcatactaagcaccgacctcaagttgcaataatctgtggttctggattaggaggtctgactgataaattaactcaggcccagatctttgactacagtgaaatccccaactttcctcgaagtacagtgccaggtcatgctggccgactggtgtttgggttcctgaatggcagggcctgtgtgatgatgcagggcaggttccacatgtatgaagggtacccactctggaaggtgacattcccagtgagggttttccaccttctgggtgtggacaccctggtagtcaccaatgcagcaggagggctgaaccccaagtttgaggttggagatatcatgctgatccgtgaccatatcaacctacctggtttcagtggtcagaaccctctcagagggcccaatgatgaaaggtttggagatcgtttccctgccatgtctgatgcctacgaccggactatgaggcagagggctctcagtacctggaaacaaatgggggagcaacgtgagctacaggaaggcacctatgtgatggtggcaggccccagctttgagactgtggcagaatgtcgtgtgctgcagaagctgggagcagacgctgttggcatgagtacagtaccagaagttatcgttgcacggcactgtggacttcgagtctttggcttctcactcatcactaacaaggtcatcatggattatgaaagcctggagaaggccaaccatgaagaagtcttagcagctggcaaacaagctgcacagaaattggaacagtttgtctccattcttatggccagcattccactccctgacaaagccagttgacctgccttggagtcgtctggcatctcccacacaagacccaagtagctgctaccttctttggccccttgctggagtcatgtgcctctgtccttaggttgtagcagaaaggaaaagattcctgtccttcacctttcccactttcttctaccagacccttctggtgccagatcctcttctcaaagctgggattacaggtgtgagcatagtgagaccttggcgctacaaaataaagctgttctcattcctgttctttcttacacaagagctggagcccgtgccctaccacacatctgtggagatgcccaggatttgactcgggccttagaactttgcatagcagctgctactagctctttgagataatacattccgaggggctcagttctgccttatctaaatcaccagagaccaaacaaggactaatccaatacctcttgga

SEQ ID NO: 62 - protein, 289 aa, Homo sapiens
MENGYTYEDYKNTAEWLLSHTKHRPQVAIICGSGLGGLTDKLTQAQIFDYSEIPNFPRSTVPGHAGRLVFGFLNGRACVMMQGRFHMYEGYPLWKVTFPVRVFHLLGVDTLVVTNAAGGLNPKFEVGDIMLIRDHINLPGFSGQNPLRGPNDERFGDRFPAMSDAYDRTMRQRALSTWKQMGEQRELQEGTYVMVAGPSFETVAECRVLQKLGADAVGMSTVPEVIVARHCGLRVFGFSLITNKVIMDYESLEKANHEEVLAAGKQAAQKLEQFVSILMASIPLPDKAS

SEQ ID NO: 63 - DNA, 1745 bp, Homo sapiens
  CDS (124)...(1614)
tggaagcagcgtaaaggatggacaggaatgcagaggtaggcaggaggaccagcagtgtgactgctgaaacccaggggagggccccgcggctctgaggttgctcgcgcgcccccgccgatcgccatggatcggatgaagaagatcaaacggcagctgtcaatgacactccgaggtggccgaggcatagacaagaccaatggtgcccctgagcagataggcctggatgagagtggtggtggtggcggcagtgaccctggagaggcccccacacgtgctgctcctggggaacttcgttctgcacggggcccactcagctctgcaccagagattgtgcacgaggacttgaagatggggtctgatggggagagtgaccaggcttcagccacgtcctcggatgaggtgcagtctccagtgagagtgcgtatgcgcaaccatcccccacgcaagatctccactgaggacatcaacaagcgcctatcactaccagctgacatccggctgcctgagggctacctggagaagctgaccctcaatagccccatctttgacaagcccctcagccgccgcctccgtcgtgtcagcctatctgagattggctttgggaaactggagacctacattaagctggacaaactgggcgagggtacctatgccaccgtctacaaaggcaaaagcaagctcacagacaaccttgtggcactcaaggagatcagactggaacatgaagagggggcaccctgcaccgccatccgggaagtgtccctgctcaaggacctcaaacacgccaacatcgttacgctacatgacattatccacacggagaagtccctcacccttgtctttgagtacctggacaaggacctgaagcagtacctggatgactgtgggaacatcatcaacatgcacaacgtgaaactgttcctgttccagctgctccgtggcctggcctactgccaccggcagaaggtgctacaccgagacctcaagccccagaacctgctcatcaacgagaggggagagctcaagctggctgactttggcctggcccgagccaagtcaatcccaacaaagacatactccaatgaggtggtgacactgtggtaccggccccctgacatcctgcttgggtccacggactactccactcagattgacatgtggggtgtgggctgcatcttctatgagatggccacaggccgtcccctctttccgggctccacggtggaggaacagctacacttcatcttccgtatcttaggaaccccaactgaggagacgtggccaggcatcctgtccaacgaggagttcaagacatacaactaccccaagtaccgagccgaggcccttttgagccacgcaccccgacttgatagcgacggggccgacctcctcaccaagctgttgcagtttgagggtcgaaatcggatctccgcagaggatgccatgaaacatccattcttcctcagtctgggggagcggatccacaaacttcctgacactacttccatatttgcactaaaggagattcagctacaaaaggaggccagccttcggtcttcgtcgatgcctgactcaggcaggccagctttccgcgtggtggacaccgagttctaagccacagaccgaggccccagcaggcagcggctggagggatgccacacccctcacagggcagcccccaactacatcttccctgcttactctctgcctacctgcctgagccatgttcacctgcccacttgtcc

SEQ ID NO: 64 - protein, 496 aa, Homo sapiens [sequence omitted]

SEQ ID NO: 65 - DNA, 6207 bp, Homo sapiens
  CDS (81)...(3590)
gagagacacgaatatgtttcagccgcaacaggctgcgtttcagccggaagagtgaaagggcaccttgaaaacgcaagtttatgaatatgtttctgtactttcagaccatcatcaaagaggggatgctgaccaaacagaacaattcattccagcgatcaaaaaggagatactttaagcttcgagggcgaacgctttactatgccaaaacggcaaagtcaatcatatttgatgaggtggatctgacagatgccagcgtagctgaatccagtaccaaaaacgtcaacaacagttttacggtcataactccatgcaggaagctcatcttgtgtgctgataacagaaaagaaatggaagattggattgcagcattaaagactgtgcagaacagggagcactttgagcccacccagtacagcatggaccacttctcagggatgcacaattggtacgcctgttcccacgcgaggccgacctactgcaatgtgtgccgtgaggctctgtctggggtcacgtcgcacgggctgtcctgcgaggtgtgcaaatttaaggcccacaagcgctgtgctgtgcgtgcaaccaataactgcaagtggaccacactggcctcgatcgggaaggacatcattgaagatgcagatgggattgcaatgccccaccagtggttggaaggaaacctacctgtgagcgccaagtgcactgtgtgcgacaagacctgtggcagtgtgctgcgcctgcaggactggcgctgcctctggtgcaaggccatggttcacacatcgtgtaaagaatccttgctgaccaagtgcccacttggcctgtgcaaagtgtcagtcatcccacccacggctctcaacagcatcgactccgatgggttctggaaggccagctgtcctccttcttgcacaagcccactgttggtcttcgtcaattcaaaaagtggggacaaccagggtgtgaagttcctcagaagattcaaacagctactaaaccccgcccaggtcttcgacctcatgaacggaggcccacacctcggcttacggttattccagaagtttgacacattccggattctggtttgtggcggggatggaagtgttggctgggtcctctccgaaatcgacagcctcaaccttcataaacagtgtcagctgggagtgctgccgctcggcacagggaacgacttggcccgagtactgggctggggctcagcctgcgatgacgacacccagctcccccagatcttggagaagttggagagagccagcaccaagatgctggacaggtggagcgtcatggcatacgaggccaagctcccccggcaggcctcctcctctaccgtcaccgaagacttcagcgaggattccgaggtacagcagattctcttctatgaagactcggttgcagcccacctttctaaaatcctcacctcggaccagcactcggtggtcatctcctcggccaaagtgctctgtgagacgccgaaggacttcgtggcacgggtggggaaggcctatgagaagacgaccgagagctcggaggagtcagaggtcatggccaagaagtgctctgtcctgaaagagaagctggattcccttctcaagaccttggacgatgagtcccaggcctcgtcctctctgcccaacccgccccccaccattgccgaggaggctgaagatggagatgggtcgggcagcatctgcggttccaccggagaccgcttggtggcatcagcttgcccggcccggccgcagatattccggcctcgagaacagctcatgctgagagccaacagcctgaagaaagcaattcgtcagatcatagaacacacagaaaaagctgtcgatgagcagaatgcccagacccaggagcaggagggcttcgtcctgggcctctctgagtcagaggagaagatggaccacagagtgtgcccaccactgtcccacagcgagagcttcggggtccccaaggggaggagccagcgcaaagtgtcgaaatctccgtgtgaaaagctgatcagcaaagggagtctgtccctaggcagttctgcttcccttccgccccagccgggaagccgggacggcctgcctgcgctcaacaccaagatcctgtacccaaatgtccgggctggaatgtctggttccttacccggtggctcagtcatcagtcgcctgttaattaatgctgatcccttcaactctgaaccagaaaccctagagtattacacggagaaatgtgtcatgaacaactattttggcattggcctggatgcgaagatatccctggactttaacaacaagcgcgatgagcacccagagaagtgcaggagccgaaccaagaacatgatgtggtatggagttcttggaaccaaagagttgctgcacagaacctacaagaacctggagcaaaaggtcttgctggagtgtgacggcgacccatcccactccccagtccttcagggaattgctgtccttaacattcccagctatgccggaggaaccaacttctgggggggtaccaaggaagatgatactttcgcagctccatcattcgatgacaagattctggaggtggtcgccgtgttcggcagcatgcagatggccgtctctcgagtcatcaggctacagcatcatcggatcgcccagtgtcgcacggtgaagatctccatccttggggatgagggcgtgcctgtgcaggtggacggagaggcctgggtccagccgccagggtacattcggattgtccacaagaaccgggcacagacactgaccagagacagggcatttgagagcaccctgaagtcctgggaagacaagcagaagtgcgaggtgccccgccctccatcctgttccctgcacccggagatgctgtccgaggaggaggccacccagatggaccagtttgggcaggcagcaggggtcctcattcacagtatccgagaaatagctcagtctcaccgggacatggagcaggaactggcccacgccgtcaatgccagctccaagtccatggaccgtgtgtatggcaagcccagaaccacagaggggctcaactgcagcttcgtcctggaaatggtgaataacttcagagctctgcgcagtgagacggagctgctgtctgggaagatggccctgcagctggatccgcctcagaaggagcagctggggagtgctcttgccgagatggaccgacagctcaggaggctggcagacaccccgtggctctgccagtccgcagagcccggcgacgaagagagtgtgatgctggatcttgccaagcgcagtcgcagtggtaaattccgcctcgtgaccaagtttaaaaaggagaaaaacaacaagaacaaagaagctcacagtagcctgggagccccggttcacctctgggggacagaggaggttgctgcctggctggagcacctcagtctctgtgagtataaggacatcttcacacggcacgacatccggggctctgagctcctgcacctggagcggagggacctcaaggacctgggcgtgaccaaggtgggccacatgaagaggatcctgtgtggcatcaaggagctgagccgcagcgcccccgccgtcgaggcctagcctctgtcctctcagcctgtggcctccacatccccgccgccgaggcctagcctccgccctctcagcctgtggcctctgcgcctcctgccactgaggccctgggcagatgctgcagcccgcccccttctcatggtgctacttcctctgtcagctacagaaagcctccgtgacaccgtccaccagagctctggggtctcgaacataacaacacagctacctttgaaacaacactttctccagctcagagtcacctggggcacatgtgtcacggccactcagctctcgcccgcctgtgctgtgggccagggaatccagcggcgtctggcctcctgggcactgcttgcctggcctcgtgcttggattgtcccgggggctcctctccgtgtgtccttctgtggccgcaccgtgtggctccgctcctggcccccagccagttctcagaaacgtggctggggcccagcacagcagcctgcaagggcccctgtttgttgatgcagcttttgttgaacaaaaatcgtgctctttcctggtttgaaagtagcatggatgtttccagtcttgttgattgtaatttgacgtgaagagaaaaaaacattcctcctgcgtgagccaaggcagcgggtgcttgttcccaggcgggagccctccctgggtgtcacaggtcctgtgctcctccctcctccatcctctctcctcccgctcctccctccccccactgtgggctggggacgcctgccttctgtctccggacgctctaggcgagttcagcttggggtgtgagtgagacagcttgccagctgcatccctgcagacagaggatgtgtgtccacatgagtgtttctgtgtgggaaatgcttcctggctctgggaaactttttctgcccattctgtggttcccagggagcgtggccctggtgcaggggtggtttgacctcttcagcccgtccggtggcctggacggaggctctctgagtgtctgcccctgcgatggcttcttgtcgcctgctgctggggctgatgtcgctggaggtgctggcagggactctgatttggtggtccgcgctgcccctgccctgcctctgtcctggctctgaactagtagatgatggtgccagagggcagggagctcgcctggggagagggctgtgccccgtagggacagtgcccaggtgaaggatgcccctggtcctccagggcactgactttgcccttttttcccgttgatagtcatggctcagaggtgcttgtaaatgtcttgggaagaggtttctgtaacccctgccctggtgtgaggaggaaatggctctggcctggctgcctggcgtggcttctctttggctcccaaagagaaggacagtgttgggagtatctgccgtggcttctctttggctcccaaagagaaggacagtgttgggagtatctgccggcgctgtccaggtcctttagtcagcgtcactccatctgatgtgcagaagctgggctgcacctgcgggggtgggcatagaccgggctgggtctgcagcagcccctggtcctgagcaggcggcagtgaacagcactggcccacctcccactcacagcccctctgtcccctctgcagtgcacccaggtggcccctctgcgtgcctttgggtgctcccctctcgtggtcgttctggcccgaggcccttagagtatggaggctgagccaggccttgggtttccccagcacagcctcctgtcgctgcatgcacgtgttgggatttttggatgaagactctcccacgctctgttggtggacttagctgcctcactggagattgtgggtggaaggtggttgtatgttacctttaccacctctcattgttttccccagaacattgtagatgggggttggcagagggagaaatatgccagccacggcagtcgcttggtttcccaggtggaatgggctaacacaggagatgatgggaacctgtcccgcagtccctgcatgaccattggccctgctggcctggcgatgtgggcatcctggggttcttagggtcccagaacaagccccaggcaagctggaacttgggtggggaggggacatgaggaggataaacagctgactgtggcttcaaggacatcagggccaccccaagtcctcagtgtcctactcctggcaagattgggtttggatcaaaagtgtttaaaattaatatgttgtcagtgattagaacaacactgtttacataaaaaccatttttctaattctaacaagttagaatgtgaggaaggaatgaacatgagtgtttaggaacctgccctttggtgctgggctggcgtcccgcactggggtgtcctcgctgtctgggggctgctctgcttccccggcccaggtccccttgtggtgttgccagacgggcctcatggtctgctgtgcagagagaggcaggaaggatccctgaagagtcttggagaaaaggttctgtgccctcaggtggggcttaccccctcgtatttataatcttaatttatatagtgaccaccgtggaaacaaacgcctcttgtattgtcatgtacatagtccatacctgagtgctgtacataagttgttctgtgtataaataaaacaagcctgtttttgatcttc

SEQ ID NO: 66 - protein, 1169 aa, Homo sapiens [sequence omitted]

SEQ ID NO: 67 - DNA, 4331 bp, Homo sapiens
  CDS (1)...(3936)
atgtcgctgctgcagtctgcgctcgacttcttggcgggtccaggctccctgggcggtgcttccggccgcgaccagagtgacttcgtggggcagacggtggaactgggcgagctgcggctgcgggtgcggcgggtcctggccgaaggagggtttgcatttgtgtatgaagctcaagatgtggggagtggcagagagtatgcattaaagaggctattatccaatgaagaggaaaagaacagagccatcattcaagaagtttgcttcatgaaaaagctttccggccacccgaacattgtccagttttgttctgcagcgtctataggaaaagaggagtcagacacggggcaggctgagttcctcttgctcacagagctctgtaaagggcagctggtggaatttttgaagaaaatggaatctcgaggccccctttcgtgcgacacggttctgaagatcttctaccagacgtgccgcgccgtgcagcacatgcaccggcagaagccgcccatcatccacagggacctcaaggttgagaacttgttgcttagtaaccaagggaccattaagctgtgtgactttggcagtgccacgaccatctcgcactaccctgactacagctggagcgcccagaggcgagccctggtggaggaagagatcacgaggaatacaacaccaatgtatagaacaccagaaatcatagacttgtattccaacttcccgatcggcgagaagcaggatatctgggccctgggctgcatcttgtacctgctgtgcttccggcagcacccttttgaggatggagcgaaacttcgaatagtcaatgggaagtactcgatccccccgcacgacacgcagtacacggtcttccacagcctcatccgcgccatgctgcaggtgaacccggaggagcggctgtccatcgccgaggtggtgcaccagctgcaggagatcgcggccgcccgcaacgtgaaccccaagtctcccatcacagagctcctggagcagaatggaggctacgggagcgccacactgtcccgagggccaccccctcccgtgggccccgctggcagtggctacagtggaggcctggcgctggcggagtacgaccagccgtatggcggcttcctggacattctgcggggtgggacagagcggctcttcaccaacctcaaggacacctcctccaaggtcatccagtccgtcgctaattatgcaaagggtgacctggacatatcttacatcacatccagaattgcagtgatgtcattcccagcagaaggtgtggagtcagcgctcaaaaacaacatcgaagatgtgcggttgttcctggactccaagcacccagggcactatgccgtctacaacctgtccccgaggacctaccggccctccaggttccacaaccgggtctccgagtgtggctgggcagcacggcgggccccacacctgcacaccctgtacaacatctgcaggaacatgcacgcctggctgcggcaggaccacaagaacgtctgcgtcgtgcactgcatggacgggagagccgcgtctgctgtggccgtctgctccttcctgtgcttctgccgtctcttcagcaccgcggaggccgccgtgtacatgttcagcatgaagcgctgcccaccaggcatctggccatcccacaaaaggtacatcgagtacatgtgtgacatggtggcggaggagcccatcacaccccacagcaagcccatcctggtgagggccgtggtcatgacacccgtgccgctgttcagcaagcagaggagcggctgcaggcccttctgcgaggtctacgtgggggacgagcgtgtggccagcacctcccaggagtacgacaagatgcgggactttaagattgaagatggcaaagcggtgattcccctgggcgtcacggtgcaaggagacgtgctcatcgtcatctatcacgcccggtccactctgggcggccggctgcaggccaagatggcatccatgaagatgttccagattcagttccacacggggtttgtgcctcggaacgccaccactgtgaaatttgccaagtatgacctggacgcgtgtgacattcaagaaaaatacccggatttatttcaagtgaacctggaagtggaggtggagcccagggacaggccgagccgggaagccccaccatgggagaactcgagcatgagggggctgaaccccaaaatcctgttttccagccgggaggagcagcaagacattctgtctaagtttgggaagccggagcttccccggcagcctggctccacggctcagtatgatgctggggcagggtccccggaagccgaacccacagactctgactcaccgccaagcagcagcgcggacgccagtcgcttcctgcacacgctggactggcaggaagagaaggaggcagagactggtgcagaaaatgcctcttccaaggagagcgagtctgccctgatggaggacagagacgagagtgaggtgtcagatgaagggggatccccgatctccagcgagggccaggaacccagggccgacccagagccccccggcctggcagcagggctggtgcagcaggacttggtttttgaggtggagacaccggctgtgctgccagagcctgtgccacaggaagacggggtcgacctcctgggcctgcactccgaggtgggcgcagggccagctgtacccccgcaggcctgcaaggccccctccagcaacaccgacctgctcagctgcctccttgggccccctgaggccgcctcccaggggcccccggaggatctgctcagcgaggacccgctgctcctggcaagcccggcccctcccctgagcgtgcagagcaccccaagaggagggccccctgccgctgctgacccctttggcccgcttctgccgtcttcaggcaacaactcccagccctgctccaatcctgatctcttcggcgaatttctcaattcggactctgtgaccgtcccaccatccttcccgtctgcccacagcgctccgcccccatcctgcagcgccgacttcctgcacctgggggatctgccaggagagcccagcaagatgacagcctcgtccagcaacccagacctgctgggaggatgggctgcctggaccgagactgcagcgtcggcagtggcccccacgccagccacagaaggccccctcttctctcctggaggtcagccggccccttgtggctctcaggccagctggaccaagtctcagaacccggacccatttgctgaccttggcgacctcagctccggcctccaaggctcaccagctggatttcctcctgggggcttcattcccaaaacggccaccacggccaaaggcagcagctcctggcagacaagtcggccgccagcccagggcgcctcatggccccctcaggccaagccgccccccaaagcctgcacacagccaaggcctaactatgcctcgaacttcagtgtgatcggggcgcgggaggagcggggggtccgcgcacccagctttgctcaaaagccaaaagtctctgagaacgactttgaagatctgttgtccaatcaaggcttctcctccaggtctgacaagaaagggccaaagaccattgcagagatgaggaagcaggacctggctaaagacacggacccactcaagctgaagctcctggactggattgagggcaaggagcggaacatccgggccctgctgtccacgctgcacacagtgctgtgggacggggagagccgctggacgcccgtgggcatggccgacctggtggctccggagcaagtgaagaagcactatcgccgcgcggtgctggccgtgcaccccgacaaggctgcggggcagccgtacgagcagcacgccaagatgatcttcatggagctgaatgacgcctggtcggagtttgagaaccagggctcccggcccctcttctgaggccgcagtggtggtggctgcgcacacagctccacaggttgggagccgtcgtgggacctgggtccccaccgtgaggaccccgtgggcgacagcaggtgtggccagggtggggctccgagccccgggtcaccgcccgcccagcgttccaggcacatgaagagaaagcattccaaagcctctgattgttgtttcctttttctcctcccgaaggaacagctgattcatgctcctcccgcaattgtcacgtctgtgatttatttggtgtttcgggcgtggcctctggagccccggcacgtggtgggccacgctgctggcgctcatgggccctggtgtttgcaccgcactttgtaatcagtcccgtggttgtctgtacagaattaaactattttccgatg

SEQ ID NO: 68 - protein, 1311 aa, Homo sapiens
MSLLQSALDFLAGPGSLGGASGRDQSDFVGQTVELGELRLRVRRVLAEGGFAFVYEAQDVGSGREYALKRLLSNEEEKNRAIIQEVCFMKKLSGHPNIVQFCSAASIGKEESDTGQAEFLLLTELCKGQLVEFLKKMESRGPLSCDTVLKIFYQTCRAVQHMHRQKPPIIHRDLKVENLLLSNQGTIKLCDFGSATTISHYPDYSWSAQRRALVEEEITRNTTPMYRTPEIIDLYSNFPIGEKQDIWALGCILYLLCFRQHPFEDGAKLRIVNGKYSIPPHDTQYTVFHSLIRAMLQVNPEERLSIAEVVHQLQEIAAARNVNPKSPITELLEQNGGYGSATLSRGPPPPVGPAGSGYSGGLALAEYDQPYGGFLDILRGGTERLFTNLKDTSSKVIQSVANYAKGDLDISYITSRIAVMSFPAEGVESALKNNIEDVRLFLDSKHPGHYAVYNLSPRTYRPSRFHNRVSECGWAARRAPHLHTLYNICRNMHAWLRQDHKNVCVVHCMDGRAASAVAVCSFLCFCRLFSTAEAAVYMFSMKRCPPGIWPSHKRYIEYMCDMVAEEPITPHSKPILVRAVVMTPVPLFSKQRSGCRPFCEVYVGDERVASTSQEYDKMRDFKIEDGKAVIPLGVTVQGDVLIVIYHARSTLGGRLQAKMASMKMFQIQFHTGFVPRNATTVKFAKYDLDACDIQEKYPDLFQVNLEVEVEPRDRPSREAPPWENSSMRGLNPKILFSSREEQQDILSKFGKPELPRQPGSTAQYDAGAGSPEAEPTDSDSPPSSSADASRFLHTLDWQEEKEAETGAENASSKESESALMEDRDESEVSDEGGSPISSEGQEPRADPEPPGLAAGLVQQDLVFEVETPAVLPEPVPQEDGVDLLGLHSEVGAGPAVPPQACKAPSSNTDLLSCLLGPPEAASQGPPEDLLSEDPLLLASPAPPLSVQSTPRGGPPAAADPFGPLLPSSGNNSQPCSNPDLFGEFLNSDSVTVPPSFPSAHSAPPPSCSADFLHLGDLPGEPSKMTASSSNPDLLGGWAAWTETAASAVAPTPATEGPLFSPGGQPAPCGSQASWTKSQNPDPFADLGDLSSGLQGSPAGFPPGGFIPKTATTAKGSSSWQTSRPPAQGASWPPQAKPPPKACTQPRPNYASNFSVIGAREERGVRAPSFAQKPKVSENDFEDLLSNQGFSSRSDKKGPKTIAEMRKQDLAKDTDPLKLKLLDWIEGKERNIRALLSTLHTVLWDGESRWTPVGMADLVAPEQVKKHYRRAVLAVHPDKAAGQPYEQHAKMIFMELNDAWSEFENQGSRPLF

SEQ ID NO: 69 - DNA, 5519 bp, Homo sapiens
  CDS (642)...(2939)
aagtactgactgttcaaagctcaggcaaaccatgcagatccacgtgttgttggaggaggcgctcccttcaggagaccacagagggggagtgactgtggctgaccatgtgggcagaggggctggcgggctggcccctgcgagaggcggactcagggctgctggatgctccgtccttggccgctttgatctggagccacgtgtcacccagagctttggcaaagtggtcgtccacggagcccgtgatggacacggagttgggtgccggctcgggctccttgtaattcttgcccaggctcctgcggaaatgctcctccaccacggggtcacaggtggtggcagcgctcggtggcctccggtagctggcaggcccgggcgcggcctcgtgccgaattcggcacgagggggtttcggcggccgggagggagttgtcggcgccgcggccgctgcggacggacgctcgcctgccggctgaggaaaaagaagcaactaacaaaacactgtgataataaggattattcagtatgcagtttgcaggatatccatgacgacattgaaaatgaattttttgtattcaccagatattcttatatgagaagatctattttaaacagtctaaatattttttcttctgttggaccagcatggcaggatttaagcgagggtatgatggaaagattgctggattatatgatctggataaaaccttgggtcgaggccattttgccgtggttaaacttgccaggcatgtctttacgggtgaaaaggtggcagtaaaagttattgacaagacaaaactggacactctagctactggtcatcttttccaggaagtgagatgcatgaaactagtgcagcatcctaacatcgtccgcctttatgaagttattgacacccagaccaaactatatcttattctagaacttggggatgaaggagatatgtttgattatataatgaaacatgaggagggtcttaatgaagacttgcccaagaagtattttgctcagatagttcatgctatatcttattgccataaactccatgtggttcacagagacttaaaaccagagaatgtagtcttctttgaaaaacaaggtcttgtaaagttgacagactttgggttcagcaacaaatttcaaccagggaagaagctcactacaagctgtggatctcttgcatattccgctccagaaattctgcttggtgatgagtatgatgcacctgcagtagatatttggagtctgggagtgatccttttcatgttggtgtgtgggcagccgccctttcaagaagccaatgacagtgaaacactgacaatgatcatggattgcaaatatacagtaccatcccatgtgtctaaagagtgtaaagacctaatcacacggatgctacagagagatcccaagagaagggcttctttagaagagattgaaaatcatccttggcttcagggagtggacccttcaccagctacaaagtataacattccccttgtgtcatacaaaaatctctcggaagaggagcacaacagcatcattcagcgcatggtgcttggggacatagcggatcgagacgccattgtagaagccctggaaaccaacaggtataaccatatcacagccacatacttcctgctggctgaaaggatcctgagagaaaagcaagagaaagaaatacagaccagatctgcaagcccgagcaatatcaaggcccagtttaggcagtcatggccaaccaaaattgatgtaccccaggaccttgaggatgacctcacggccactcctttgtcccacgcgactgtccctcagtctcctgctcgggctgctgacagtgtcctcaatggccacaggagcaaaggcctgtgtgactcagctaagaaagatgacctccctgagttggctggaccagcactctctacggtgccacccgcaagcttaaaacccacagccagtgggcggaagtgtctgttcagggtggaagaagatgaagaggaagatgaggaggacaagaaacccatgtccctctcaacacaagtggttttgcgccggaagccatctgtaaccaaccgcctgacatccaggaagagtgcgcccgtcctcaaccagatctttgaggaaggggaatctgatgatgagtttgacatggatgagaatctgcctcccaagttgagcaggttaaagatgaatatagcttctccaggtacagttcacaaacgctaccaccggaggaaaagtcagggccggggctccagctgcagtagttcggagaccagtgatgatgattctgaaagccggcggcggctcgataaagatagcgggttcacctactcctggcaccgacgggatagcagcgaggggccccctggcagtgagggggatggcgggggccagagcaagccgagcaatgccagtggaggggtggacaaggccagccccagtgagaacaatgctggtgggggcagtccctccagcggctcgggtggcaaccccaccaatacatcgggtaccacacgccgctgtgccggccccagcaactccatgcagctggcctctcgcagtgctggggagctcgttgagagcctcaaactcatgagcctctgcctcggctcccagcttcatgggagcaccaagtacattattgatccacagaatggcttgtcattttccagtgtgaaagtccaagagaaatctacgtggaaaatgtgcattagctccacagggaatgcagggcaggtccctgcagtgggcggcataaagtttttctctgaccacatggcagataccaccactgaattggaacggataaagagcaagaacctgaaaaataacgtgctgcagctacctctgtgcgaaaagaccatctctgtgaacatccagcggaaccctaaggaggggctgctgtgcgcatccagcccagccagctgttgccatgtcatctgactgtggccccatctggccgctagcacgcttcctgctcagagcagtgaagaccggctcacttcactgttccatttggttttactattttaaagtgggcgttaggagcaattatttattacctttccatttgttcgcctgatgatgtgacaatgcatggtctttgtgcatgctgctagacacttttctttcccagccgaaaagcctattatgtaatttttacattcataattttaatgtggatgatcaggattaaatcaagatatatatctggaacctcttataaatggagcacttagaaatttgttgttctgcacttaacctagagagagaaaaaatgcttttctttgtgaaaaatctgaattcctgtcctgaccttctgtgatgtggaaaccctaggctctgagacacactctctggtgtctgagacagaaccaaagcaataacgttgtgatgcccacaggcctggagccagctagcgaccttgtgccgcccagctgtccatggcccgtgcagagcagaggacagtgagtgtctgcactgagaaccttaaaccacagttgaacatacccacacctgtttgtcttaagctatagtgtaaaaacaaagtttgggctctgaaaatttaactgaaaaagatttccttgtttttgtaataggtgagataaagtacttagatttataaggcagcttcccctgtagtgataaattacaagcagacaatcttattttgtaatgtgatgaagtgatgatgtcttaactctacttagagagtgtatgtctgtctaacagaacaaaaagatgctctgtgtaaattccttcctgtagggcacactgcaggatttccatgtagatagaagaactatagggcctagtacagaaggtgcacacaaatgttggcaaagtcaaaccccatgaattaaaacctactggaatttggtttttaggagtttggtaattagattatctcttttgttattttcattcagttatatcctttggctcagctagctttgaaattggctgatgaaaaaatatacataaaagggtaaaattcacacatacagcaaacaaaaatgcacaaagcctgcttcgtaacttttttttctggaattgtttttcactttgcctttttctgccaaaacaataatcaaagaactcttgctttaacctattcctgtacaaagactgtttttgaccagataatcatctgttgtggcattctatcttgtaggacactgtatattgcaaattgctgattatggaaggggccagttgctgttttttcatgcagtgccctgggagtcttaaaagcagtgcttagcaacattggtgatagcatgtggctgggacccagggcccttccccactcttcagccccgagtcatgtgtctgaggtgacggactgagacgcatctggtcctgtaattcagagagtgggcacatcaccaaagaactgcattgctgtggtcactgtttcttcaagtacacactgactctgctactttaggataaatatattttactcagaactctgaatttcacagtatacttactaaactaagtaaaaatgatacttaaaatacttattttactttctagacctaggctagatgttttaagctacagctctagttcattgtgatatttataatttgaaagctatgagaatagatgtgtgggtgaagccatagaacatatttgcttgaaattcttgagcagggatcttataaagggccagaaataagatgtgtggttcacatagatagtgagcgtaacatctgtattaaacataggagagaagtttataaagggcattggcaataaactctttgttgcagctgttttccaagcagtgtaaatactttttcctgtgattatgtatagccttggaatggcaccttttaactaacccatatgtgtttggtttcaatggttttttatattcagatgtatatatggtgctcactttaggatcagcagtgttgaccatttatgctgcatagctgtattatagccttattagttgtgtggttgacccttggggtatacaaatgtcagtctgagtggtgtcttactcctttgtttataagtgaatgattgtgcatgttttgtatgtcatagtatgtcgtcacataaaagggagggagcgaaaaaccattacattaagataatattggaccaaactacttacttgctctaaacagttacttgtaccccttaacctgtcttcaaaagttgcatatagttacagtagtgtataaattaaatattgtggaaaaacagtcttgtatttttctgtatgtgtgtatatatatataattatgtacttctggcaattctatctgtatttaaagatgtgacaatcttgacaccaattttaagaatagctgtgagaccgaattaaagataatccctaccaagtgaaaattgatgtgtgttaagagggtacagaattatcaactgatttggtcagttgcttccaatgctggttgatttccctcattgtgtaaacattgacaggtatgtgacaaatgggaaaaaaaatccaaataataaagtgacatattggtgttcagcaat

SEQ ID NO: 70 - protein, 765 aa, Homo sapiens
MAGFKRGYDGKIAGLYDLDKTLGRGHFAVVKLARHVFTGEKVAVKVIDKTKLDTLATGHLFQEVRCMKLVQHPNIVRLYEVIDTQTKLYLILELGDEGDMFDYIMKHEEGLNEDLPKKYFAQIVHAISYCHKLHVVHRDLKPENVVFFEKQGLVKLTDFGFSNKFQPGKKLTTSCGSLAYSAPEILLGDEYDAPAVDIWSLGVILFMLVCGQPPFQEANDSETLTMIMDCKYTVPSHVSKECKDLITRMLQRDPKRRASLEEIENHPWLQGVDPSPATKYNIPLVSYKNLSEEEHNSIIQRMVLGDIADRDAIVEALETNRYNHITATYFLLAERILREKQEKEIQTRSASPSNIKAQFRQSWPTKIDVPQDLEDDLTATPLSHATVPQSPARAADSVLNGHRSKGLCDSAKKDDLPELAGPALSTVPPASLKPTASGRKCLFRVEEDEEEDEEDKKPMSLSTQVVLRRKPSVTNRLTSRKSAPVLNQIFEEGESDDEFDMDENLPPKLSRLKMNIASPGTVHKRYHRRKSQGRGSSCSSSETSDDDSESRRRLDKDSGFTYSWHRRDSSEGPPGSEGDGGGQSKPSNASGGVDKASPSENNAGGGSPSSGSGGNPTNTSGTTRRCAGPSNSMQLASRSAGELVESLKLMSLCLGSQLHGSTKYIIDPQNGLSFSSVKVQEKSTWKMCISSTGNAGQVPAVGGIKFFSDHMADTTTELERIKSKNLKNNVLQLPLCEKTISVNIQRNPKEGLLCASSPASCCHVI

SEQ ID NO: 71 - DNA, 1354 bp, Homo sapiens
  CDS (21)...(1085)
gattctcagtgctgcggatcatgtccctaaggggcagcctctcgcgtctcctccagacgcgagtgcattccatcctgaagaaatccgtccactccgtggctgtgataggagccccgttctcacaagggcagaaaagaaaaggagtggagcatggtcccgctgccataagagaagctggcttgatgaaaaggctctccagtttgggctgccacctaaaagactttggagatttgagttttactccagtccccaaagatgatctctacaacaacctgatagtgaatccacgctcagtgggtcttgccaaccaggaactggctgaggtggttagcagagctgtgtcagatggctacagctgtgtcacactgggaggagaccacagcctggcaatcggtaccattagtggccatgcccgacactgcccagacctttgtgttgtctgggttgatgcccatgctgacatcaacacaccccttaccacttcatcaggaaatctccatggacagccagtttcatttctcctcagagaactacaggataaggtaccacaactcccaggattttcctggatcaaaccttgtatctcttctgcaagtattgtgtatattggtctgagagacgtggaccctcctgaacattttattttaaagaactatgatatccagtatttttccatgagagatattgatcgacttggtatccagaaggtcatggaacgaacatttgatctgctgattggcaagagacaaagaccaatccatttgagttttgatattgatgcatttgaccctacactggctccagccacaggaactcctgttgtcgggggactaacctatcgagaaggcatgtatattgctgaggaaatacacaatacagggttgctatcagcactggatcttgttgaagtcaatcctcagttggccacctcagaggaagaggcgaagactacagctaacctggcagtagatgtgattgcttcaagctttggtcagacaagagaaggagggcatattgtctatgaccaacttcctactcccagttcaccagatgaatcagaaaatcaagcacgtgtgagaatttaggagacactgtgcactgacatgtttcacaacaggcattccagaattatgaggcattgaggggatagatgaatactaaatggttgtctgggtcaatactgccttaatgagaacatttacacattctcacaattgtaaagtttcccctctattttggtgaccaatactactgtaaatgtatttggttttttgcagttcacagggtattaatatgctatagtactatgtaaatttaaagaagtcataaacagcatttattaccttggtatatc

SEQ ID NO: 72 - protein, 354 aa, Homo sapiens
MSLRGSLSRLLQTRVHSILKKSVHSVAVIGAPFSQGQKRKGVEHGPAAIREAGLMKRLSSLGCHLKDFGDLSFTPVPKDDLYNNLIVNPRSVGLANQELAEVVSRAVSDGYSCVTLGGDHSLAIGTISGHARHCPDLCVVWVDAHADINTPLTTSSGNLHGQPVSFLLRELQDKVPQLPGFSWIKPCISSASIVYIGLRDVDPPEHFILKNYDIQYFSMRDIDRLGIQKVMERTFDLLIGKRQRPIHLSFDIDAFDPTLAPATGTPVVGGLTYREGMYIAEEIHNTGLLSALDLVEVNPQLATSEEEAKTTANLAVDVIASSFGQTREGGHIVYDQLPTPSSPDESENQARVRI

SEQ ID NO: 73 - DNA, 2988 bp, Homo sapiens
  CDS (85)...(2913)
tgagtaaatcgatacatcatacgcgcgctcctctggccgcccctccctccgacgatcggggaccctggcgggcggcaggaggacatggccagcgacgccgtgcagagtgagcctcgcagctggtccctgctagagcagctgggcctggccggggcagacctggcggcccccggggtacagcagcagctggagctggagcgggagcggctgcggcgggaaatccgcaaggagctgaagctgaaggagggtgctgagaacctgcggcgggccaccactgacctgggccgcagcctgggccccgtagagctgctgctgcggggctcctcgcgccgcctcgacctgctgcaccagcagctgcaggagctgcacgcccacgtggtgcttcccgacccggcggccacccacgatggcccccagtcccctggtgcgggtggccccacctgctcggccaccaacctgagccgcgtggcgggcctggagaagcagttggccattgagctgaaggtgaagcagggggcggagaacatgatccagacctacagcaatggcagcaccaaggaccggaagctgctgctgacagcccagcagatgttgcaggacagtaagaccaagattgacatcatccgcatgcaactccgccgggcgctgcaggccgaccagctggagaaccaggcagccccggatgacacccaagggagtcctgacctgggggctgtggagctgcgcatcgaagagctgcggcaccacttccgagtggagcacgcggtggccgagggtgccaagaacgtactgcgcctgctcagcgctgccaaggccccggaccgcaaggcagtcagcgaggcccaggagaaattgacagaatccaaccagaagctggggctgctgcgggaggctctggagcggagacttggggagctgcccgccgaccaccccaaggggcggctgctgcgagaagagctcgctgcggcctcctccgctgccttcagcacccgcctggccgggccctttcccgccacgcactacagcaccctgtgcaagcccgcgccgctcacagggaccctggaggtacgagtggtgggctgcagagacctcccagagaccatcccgtggaaccctaccccctcaatggggggacctgggaccccagacagccgcccccccttcctgagccgcccagcccggggcctttacagccgaagcggaagcctcagtggccggagcagcctcaaagcagaagccgagaacaccagtgaagtcagcactgtgcttaagctggataacacagtggtggggcagacgtcttggaagccatgtggccccaatgcctgggaccagagcttcactctggagctggaaagggcacgggaactggagttggctgtgttctggcgggaccagcggggcctgtgtgccctcaaattcctgaagttggaggatttcttggacaatgagaggcatgaggtgcagctggacatggaaccccagggctgcctggtggctgaggtcaccttccgcaaccctgtcattgagaggattcctcggctccgacggcagaagaaaattttctccaagcagcaagggaaggcgttccagcgtgctaggcagatgaacatcgatgtcgccacgtgggtgcggctgctccggaggctcatccccaatgccacgggcacaggcacctttagccctggggcttctccaggatccgaggcccggaccacgggtgacatatcggtggagaagctgaacctcggcactgactcggacagctcacctcagaagagctcgcgggatcctccttccagcccatcgagcctgagctcccccatccaggaatccactgctcccgagctgccttcggagacccaggagaccccaggccccgccctgtgcagccctctgaggaagtcacctctgaccctcgaagatttcaagttcctggcggtgctgggccggggtcattttgggaaggtgctcctctccgaattccggcccagtggggagctgttcgccatcaaggctctgaagaaaggggacattgtggcccgagacgaggtggagagcctgatgtgtgagaagcggatattggcggcagtgaccagtgcgggacaccccttcctggtgaacctcttcggctgtttccagacaccggagcacgtgtgcttcgtgatggagtactcggccggtggggacctgatgctgcacatccacagcgacgtgttctctgagccccgtgccatcttttattccgcctgcgtggtgctgggcctacagtttcttcacgaacacaagatcgtctacagggacctgaagttggacaatttgctcctggacaccgagggctacgtcaagatcgcagactttggcctctgcaaggaggggatgggctatggggaccggaccagcacattctgtgggaccccggagttcctggcccctgaggtgctgacggacacgtcgtacacgcgagctgtggactggtggggactgggtgtgctgctctacgagatgctggttggcgagtccccattcccaggggatgatgaggaggaggtcttcgacagcatcgtcaacgacgaggttcgctacccccgcttcctgtcggccgaagccatcggcatcatgagaaggctgcttcggaggaacccagagcggaggctgggatctagcgagagagatgcagaagatgtgaagaaacagcccttcttcaggactctgggctgggaagccctgttggcccggcgcctgccaccgccctttgtgcccacgctgtccggccgcaccgacgtcagcaacttcgacgaggagttcaccggggaggcccccacactgagcccgccccgcgacgcgcggcccctcacagccgcggagcaggcagccttcctggacttcgacttcgtggccgggggctgctagccccctcccctgcccctgcccctgcccctgcccgagagctcttagtttttaaaaaggcctttgggatttgccgga

SEQ ID NO: 74 - protein, 942 aa, Homo sapiens
MASDAVQSEPRSWSLLEQLGLAGADLAAPGVQQQLELERERLRREIRKELKLKEGAENLRRATTDLGRSLGPVELLLRGSSRRLDLLHQQLQELHAHVVLPDPAATHDGPQSPGAGGPTCSATNLSRVAGLEKQLAIELKVKQGAENMIQTYSNGSTKDRKLLLTAQQMLQDSKTKIDIIRMQLRRALQADQLENQAAPDDTQGSPDLGAVELRIEELRHHFRVEHAVAEGAKNVLRLLSAAKAPDRKAVSEAQEKLTESNQKLGLLREALERRLGELPADHPKGRLLREELAAASSAAFSTRLAGPFPATHYSTLCKPAPLTGTLEVRVVGCRDLPETIPWNPTPSMGGPGTPDSRPPFLSRPARGLYSRSGSLSGRSSLKAEAENTSEVSTVLKLDNTVVGQTSWKPCGPNAWDQSFTLELERARELELAVFWRDQRGLCALKFLKLEDFLDNERHEVQLDMEPQGCLVAEVTFRNPVIERIPRLRRQKKIFSKQQGKAFQRARQMNIDVATWVRLLRRLIPNATGTGTFSPGASPGSEARTTGDISVEKLNLGTDSDSSPQKSSRDPPSSPSSLSSPIQESTAPELPSETQETPGPALCSPLRKSPLTLEDFKFLAVLGRGHFGKVLLSEFRPSGELFAIKALKKGDIVARDEVESLMCEKRILAAVTSAGHPFLVNLFGCFQTPEHVCFVMEYSAGGDLMLHIHSDVFSEPRAIFYSACVVLGLQFLHEHKIVYRDLKLDNLLLDTEGYVKIADFGLCKEGMGYGDRTSTFCGTPEFLAPEVLTDTSYTRAVDWWGLGVLLYEMLVGESPFPGDDEEEVFDSIVNDEVRYPRFLSAEAIGIMRRLLRRNPERRLGSSERDAEDVKKQPFFRTLGWEALLARRLPPPFVPTLSGRTDVSNFDEEFTGEAPTLSPPRDARPLTAAEQAAFLDFDFVAGGC

SEQ ID NO: 75 - DNA, 1447 bp, Homo sapiens
  CDS (57)...(1316)
agtcctgctctccgcacgccaccttaggcccgcagccgtgccgggtgctcttcagcatgtccttcatcccggtggccgaggattccgacttccccatccacaacctgccctacggcgtcttctcgaccagaggcgacccaagaccgaggataggtgtggccattggcgaccagatcctggacctcagcatcatcaagcacctctttactggtcctgtcctctccaaacaccaggatgtcttcaatcagcctacactcaacagcttcatgggcctgggtcaggctgcctggaaggaggcgagagtgttcttgcagaacttgctgtctgtgagccaagccaggctcagagatgacaccgaacttcggaagtgtgcattcatctcccaggcttctgccacgatgcaccttccagccaccataggagactacacagacttctattcctctcggcagcatgctaccaacgtcggaatcatgttcagggacaaggagaatgcgttgatgccaaattggctgcacttaccagtgggctaccatggccgtgcctcctctgtcgtggtgtctggcaccccaatccgaaggcccatgggacagatgaaacctgatgactctaagcctcccgtatatggtgcctgcaagctcttggacatggagctggaaatggctttttttgtaggccctggaaacagattgggagagccgatccccatttccaaggcccatgagcacatttttggaatggtccttatgaacgactggagtgcacgagacattcagaagtgggagtatgtccctctcgggccattccttgggaagagttttgggaccactgtctctccgtgggtggtgcccatggatgctctcatgccctttgctgtgcccaacccgaagcaggaccccaggcccctgccgtatctgtgccatgacgagccctacacatttgacatcaacctctctgttaacctgaaaggagaaggaatgagccaggcggctaccatatgcaagtccaattttaagtacatgtactggacgatgctgcagcagctcactcaccactctgtcaacggctgcaacctgcggccgggggacctcctggcttctgggaccatcagcgggccggagccagaaaacttcggctccatgttggaactgtcgtggaagggaacgaagcccatagacctggggaatggtcagaccaggaagtttctgctggacggggatgaagtcatcataacagggtactgccagggggatggttaccgcatcggctttggccagtgtgctggaaaagtgctgcctgctctcctgccatcatgagattttctctgctcttctggaaacaaagggctcaagcacccctttcaaccctgtgactggggtcctccctcgggctgtaggcctggtccgccattcagtgacaaataaagccattgtgctctgaggcctgc

SEQ ID NO: 76 - protein, 419 aa, Homo sapiens
MSFIPVAEDSDFPIHNLPYGVFSTRGDPRPRIGVAIGDQILDLSIIKHLFTGPVLSKHQDVFNQPTLNSFMGLGQAAWKEARVFLQNLLSVSQARLRDDTELRKCAFISQASATMHLPATIGDYTDFYSSRQHATNVGIMFRDKENALMPNWLHLPVGYHGRASSVVVSGTPIRRPMGQMKPDDSKPPVYGACKLLDMELEMAFFVGPGNRLGEPIPISKAHEHIFGMVLMNDWSARDIQKWEYVPLGPFLGKSFGTTVSPWVVPMDALMPFAVPNPKQDPRPLPYLCHDEPYTFDINLSVNLKGEGMSQAATICKSNFKYMYWTMLQQLTHHSVNGCNLRPGDLLASGTISGPEPENFGSMLELSWKGTKPIDLGNGQTRKFLLDGDEVIITGYCQGDGYRIGFGQCAGKVLPALLPS

SEQ ID NO: 77 - DNA, 2380 bp, Homo sapiens
  CDS (7)...(1863)
gccaccatggccccgcccccaccgccactggctgccagcaccccgctcctccatggcgagtttggctcctacccagcccgaggcccacgctttgccctcacccttacatcgcaggccctgcacatacagcggctgcgccccaaacctgaagccaggccccggggtggcctggtcccgttggccgaggtctcaggctgctgcaccctgcgaagccgcagcccctcagactcagcggcctacttctgcatctacacctaccctcggggccggcgcggggcccggcgcagagccactcgcaccttccgggcagatggggccgccacctacgaagagaaccgtgccgaggcccagcgctgggccactgccctcacctgtctgctccgaggactgccactgcccggggatggggagatcacccctgacctgctacctcggccgccccggttgcttctattggtcaatccctttgggggtcggggcctggcctggcagtggtgtaagaaccacgtgcttcccatgatctctgaagctgggctgtccttcaacctcatccagacagaacgacagaaccacgcccgggagctggtccaggggctgagcctgagtgagtgggatggcatcgtcacggtctcgggagacgggctgctccatgaggtgctgaacgggctcctagatcgccctgactgggaggaagctgtgaagatgcctgtgggcatcctcccctgcggctcgggcaacgcgctggccggagcagtgaaccagcacgggggatttgagccagccctgggcctcgacctgttgctcaactgctcactgttgctgtgccggggtggtggccacccactggacctgctctccgtgacgctggcctcgggctcccgctgtttctccttcctgtctgtggcctggggcttcgtgtcagatgtggatatccagagcgagcgcttcagggccttgggcagtgcccgcttcacactgggcacggtgctgggcctcgccacactgcacacctaccgcggacgcctctcctacctccccgccactgtggaacctgcctcgcccacccctgcccatagcctgcctcgtgccaagtcggagctgaccctaaccccagacccagccccgcccatggcccactcacccctgcatcgttctgtgtctgacctgcctcttcccctgccccagcctgccctggcctctcctggctcgccagaacccctgcccatcctgtccctcaacggtgggggcccagagctggctggggactggggtggggctggggatgctccgctgtccccggacccactgctgtcttcacctcctggctctcccaaggcagctctacactcacccgtctccgaaggggcccccgtaattcccccatcctctgggctcccacttcccacccctgatgcccgggtaggggcctccacctgcggcccgcccgaccacctgctgcctccgctgggcaccccgctgcccccagactgggtgacgctggagggggactttgtgctcatgttggccatctcgcccagccacctaggcgctgacctggtggcagctccgcatgcgcgcttcgacgacggcctggtgcacctgtgctgggtgcgtagcggcatctcgcgggctgcgctgctgcgccttttcttggccatggagcgtggtagccacttcagcctgggctgtccgcagctgggctacgccgcggcccgtgccttccgcctagagccgctcacaccacgcggcgtgctcacagtggacggggagcaggtggagtatgggccgctacaggcacagatgcaccctggcatcggtacactgctcactgggcctcctggctgcccggggcgggagccctgaaactaaacaagcttggtacccgccgggggcggggcctacattccaatggggcggagcttgagctagggggtgtggcctggctgctagagttgtggtggcaggggccctggccccgtctcaggattgcgctcgctttcatgggaccagacgtgatgctggaaggtgggcgtcgtcacggttaaagagaaatgggctcgtcccgagggtagtgcctgatcaatgagggcggggcctggcgtctgatctggggccgcccttacggggcagggctcagtcctgacgcttgccacctgctcctacccggccaggatggctgagggcggagtctattttacgcgtcgcccaatgacaggacctggaatgtactggctggggtaggcctcagtgagtcggccggtcagggcccgcagcctcgccccatccactccggtgcctccatttagctggccaatcagcccaggaggggcaggttccccggggccggcgctaggatttgcactaatgttcctctccccgc

SEQ ID NO: 78 - protein, 618 aa, Homo sapiens
MAPPPPPLAASTPLLHGEFGSYPARGPRFALTLTSQALHIQRLRPKPEARPRGGLVPLAEVSGCCTLRSRSPSDSAAYFCIYTYPRGRRGARRRATRTFRADGAATYEENRAEAQRWATALTCLLRGLPLPGDGEITPDLLPRPPRLLLLVNPFGGRGLAWQWCKNHVLPMISEAGLSFNLIQTERQNHARELVQGLSLSEWDGIVTVSGDGLLHEVLNGLLDRPDWEEAVKMPVGILPCGSGNALAGAVNQHGGFEPALGLDLLLNCSLLLCRGGGHPLDLLSVTLASGSRCFSFLSVAWGFVSDVDIQSERFRALGSARFTLGTVLGLATLHTYRGRLSYLPATVEPASPTPAHSLPRAKSELTLTPDPAPPMAHSPLHRSVSDLPLPLPQPALASPGSPEPLPILSLNGGGPELAGDWGGAGDAPLSPDPLLSSPPGSPKAALHSPVSEGAPVIPPSSGLPLPTPDARVGASTCGPPDHLLPPLGTPLPPDWVTLEGDFVLMLAISPSHLGADLVAAPHARFDDGLVHLCWVRSGISRAALLRLFLAMERGSHFSLGCPQLGYAAARAFRLEPLTPRGVLTVDGEQVEYGPLQAQMHPGIGTLLTGPPGCPGREP

SEQ ID NO: 79 - DNA, 3337 bp, Homo sapiens
  CDS (99)...(1661)
gtcgagcctctagcccgcccgggtttccttcgcagtcgcgcaccgacgctcaaacgcgcgctccaacccgcagcctcctcctgcctcaccgcccgaagatggcggctctcaaactcctctcctccgggcttcggctctgcgcctctgcccgcggatctggggcaacctggtacaagggatgtgtttgttccttttccaccagtgctcatcgccataccaagttttatacagatccagtagaagctgtaaaagacatccctgatggtgccacggttttggttggtggttttgggctatgtggaattccagagaatcttatagatgctttactgaaaactggagtaaaaggactaactgcagtcagcaacaatgcaggggttgacaattttggtttggggcttttgcttcggtcgaagcagataaaacgcatggtctcttcatatgtgggagaaaatgcagaatttgaacgacagtacttatctggtgaattagaagtggagctgacaccacagggcacacttgcagagaggatccgtgcaggcggggctggagttcctgcattttacaccccaacagggtatgggaccctggtacaagaaggaggatcgcccatcaaatacaacaaagatggcagtgttgccattgccagtaagccaagagaggtgagggagttcaatggtcagcactttattttggaggaagcaattacaggggattttgctttggtgaaagcctggaaggcggaccgagcaggaaacgtgattttcaggaaaagtgcaaggaatttcaacttgccaatgtgcaaagctgcagaaaccacagtggtagaggttgaagaaattgtggatattggagcatttgctccagaagacatccatattcctcagatttatgtacatcgccttataaagggagaaaaatatgagaaaagaattgagcgtttatcaatccggaaagagggagatggggaagccaaatctgctaaacctggagatgacgtaagggaacgaatcatcaagagggccgctcttgagtttgaggatggcatgtatgctaatttgggcataggaatccctctcctggccagcaattttatcagcccaaatataactgttcatcttcaaagtgaaaatggagttctgggtttgggtccatatccacgacaacatgaagctgatgcagatctcatcaatgcaggcaaggaaacagttactattcttccaggagcctcttttttctccagcgatgaatcatttgcaatgattagaggtggacacgtcgatctgacaatgctaggagcgatgcaggtttccaaatatggtgacctggctaactggatgatacctgggaagatggtgaaaggaatgggaggtgctatggatttagtgtccagtgcgaaaaccaaagtggtggtcaccatggagcattctgcaaagggaaatgcacataaaatcatggagaaatgtacattaccattgactggaaagcaatgtgtcaaccgcattattactgaaaaggctgtgtttgatgtggacaagaagaaagggttgactctgattgagctctgggaaggcctgacagtggatgacgtacaaaagagtactgggtgtgattttgcagtttcaccaaaactcatgccaatgcagcagatcgcaaattgaaatatggatatttgtaccaggctgcgtgtttttcattttaaacacacaagatttaattgaaaggacatcaataatcataattgtgtatttaacaggtggttttttattagttttcttgtgtttcagactttatgcagccatataaactgttctctaggcatgctgtgacattttaataaaaagcaaaaggagcatttataattatctcatttgttaaggctgagaaggttgtttttataataggtaattatattgaatgcattttcactgaatatggtatgtatgctaaattatatgaacctttccccaagaagggccctagaaattgatgtggctttcctcttaaatattaattattagtcctgaaagaaagataacatatgtgatttttgtggttaggagagttgctgtcatgattgttttttcttcagcctcctctgacttttcttttggggcttcagattttatgattacatcttgtccccctagaacatcccccttcctcccatactgcttttaaacagatgcccaagaaggcaagcaggaatgcctcttgtgggggagggcagggagaaataactagttcaaaccaactatctatctatgctttgcaaagactaaggcgtattataggaagagggctagaaacctaactgattcttctcagttttctcattttaaaacagcccagtattcctttgtatcctcaagggtccttgagaatacttctgttattgaaaccctgtgggctacttgtactgtacctcctctcaagccaagaagggctgtgggataatttaccatgaatccttagtagcaatgacagcagagttaaaaaataaaaggtgttttactttcaggctcttgttttggttcagaggagattttaaatattgaatgacacttctacagaacaacggtttttcttctgccaaggctacttcctttaacgaagtgcctttaattcagccttatccaactagggaaaataatgttggacaagtctaggatttgaagagtcagtgaacttttagtgtcagggaataaacatggtgggtagattaggtttgaaaaaaacttccttagaggtatttattctcaatacctgacaggggcccatgggaatgacttcagaagcatcccggataatagatgggtaaaaagtctaggcaccctgaagaacaggtgagacagctggcctctggacagaggtaggcatagtacagtacgatatatcattcctctggtcctaaatatacaaacttattcatgtttttaggtgatgatggtcattgaaactcacttcttttcaggtgtagctacaattgtgtaatgtacaatattagagaaaggacaggctttttatgagtaacacacaccatatataaaacagcctttctggctgaccacatggttaaatgcataccttcccagtactggggggaaaatgacccttcttagaatgtgcaagttccatagagtaatatattgatatgattttgaaaagaattgttgatagttacatcttcaaacttatcattccagtatgcatctttaagataatgtgattctaagtagatgactttatattcttgattaaagagtgctatacatgttaagaaatgcattaaggaatacaataaatattctaaactgatgaaaaaaaaaaaaaaaaa

SEQ ID NO: 80 - protein, 520 aa, Homo sapiens
MAALKLLSSGLRLCASARGSGATWYKGCVCSFSTSAHRHTKFYTDPVEAVKDIPDGATVLVGGFGLCGIPENLIDALLKTGVKGLTAVSNNAGVDNFGLGLLLRSKQIKRMVSSYVGENAEFERQYLSGELEVELTPQGTLAERIRAGGAGVPAFYTPTGYGTLVQEGGSPIKYNKDGSVAIASKPREVREFNGQHFILEEAITGDFALVKAWKADRAGNVIFRKSARNFNLPMCKAAETTVVEVEEIVDIGAFAPEDIHIPQIYVHRLIKGEKYEKRIERLSIRKEGDGEAKSAKPGDDVRERIIKRAALEFEDGMYANLGIGIPLLASNFISPNITVHLQSENGVLGLGPYPRQHEADADLINAGKETVTILPGASFFSSDESFAMIRGGHVDLTMLGAMQVSKYGDLANWMIPGKMVKGMGGAMDLVSSAKTKVVVTMEHSAKGNAHKIMEKCTLPLTGKQCVNRIITEKAVFDVDKKKGLTLIELWEGLTVDDVQKSTGCDFAVSPKLMPMQQIAN

SEQ ID NO: 81 - DNA, 6828 bp, Homo sapiens
  CDS (1381)...(3366)
aatctcccaaggcctaaggaggcaagaggcctgcaaatcgcctcctgctcagcaaacgggttgctcagcaggcccggggtcctggtccaccccaggtccctggtttgcccacctccgatggcggccttcgctggcagggtgggcgcctctggggagccagctccgtcccggcgcctttagagccccatctcttccacgtccctggccttcctccccttccaggcggctgtccccgccggggtccagatggtgtcggagggccggcggttcgacggcgggcccggggttcagcctcccggcctccctccgtccctgactctcctttcttcggagagggcgcgggggccggggccaaagcgccgctcttggggttctcctggactcggagttgccccaggcgggcgcagctctgccccgcggggtgccagcctcgggcgggcaaggtccgtgagtcaccgcctgtaaccgaacaccaggcctccctgccccctcccccagctccggccgccaggctgcggcgacacctacaagaaaatgaaggggcgcccaggcccgcggcggccccggccgtatcgcgagcaggtcccggcggcccccggctcgcggcgctctttcttccccggccccggggctcggccagccgcaaccgccgccccggcgccagcaggaatccaggccgagcgaccggccccggagcccgaggcggcggagggcccgcggtagctgcgactggcgagcccgagagcgcccggggagggggcgcccggcttggaatttcccggtcccttccggcccagcgaggacaaagcactcctggccgccgccgccgccgccgccgtggcctacgccgcgccgcacaaagggcgagtcgcgacacgctcccatccccctcccagctcacggcggccccggccccgggtggctgcagggaggtgggggaagccctggctgcaccgcccctcgctccccctcccctggggccgcgcgagcgccgcccccgccccgtctgcgcgtcctcccggggaggggttggggggcgcggcgccccacataacactccccctcctgcgctgcgagccaccctctcccctccctcctgcaaacaccaccgcctcccctgccaccgccgccacctcgcccgacgctccacagctcgccgcggccggggggcggtgcgcggaccgtgcgcgccgcgggcgccagatgtgcagtccccgccgccgccagtgaccgagccgcagtccgagcggtatcgggccgcctccctgatgctgcgggggcgaccttgagcgtacagcggcttccctcggtggggaccccgacatcccagcgctgtgcccggtcttgccctctgtagcccggctcgccccgcgcttggacatggaaggggccgccgcgcctgtggcgggggaccgccccgacttggggctgggggcgccgggctctccccgagaggcggtggcgggggcgactgcagccctggagcccaggaagccgcacggggtgaagcggcatcaccacaagcacaacttgaagcaccgctacgagctgcaggagaccctgggcaaaggcacctacggcaaagtcaagcgggccaccgagaggttttctggccgagtggttgctataaaatccattcgtaaggacaaaattaaggatgaacaagacatggttcacatcagacgagagattgagatcatgtcatctctcaaccatcctcatatcatcagtatttatgaagtgtttgagaacaaagataagattgtgatcatcatggaatatgccagcaaaggggagctgtacgattacatcagtgagcggcgacgcctcagtgagagggagacccggcacttcttccggcagatcgtctctgctgtgcactattgtcacaagaacggtgtggtccaccgggacttgaagctggaaaatatactgctcgatgacaactgcaatattaagattgctgactttgggctttccaacctgtaccagaaggataagttcttacaaacgttttgtgggagtccactctatgcatctcctgagattgtcaatgggagaccttaccgagggccagaggtggacagctgggccctgggtgtgttgctttacactcttgtttatggaacaatgcccttcgatggtttcgatcacaaaaacctcattcggcaaatcagcagcggagagtaccgggagccaacacagccctcagatgctcgaggactcatacggtggatgctgatggtgaaccccgatcgccgggccactattgaggacattgccaaccactggtgggtgaactggggctataagagcagcgtgtgtgactgtgatgccctccatgactctgagtccccactcctggctcggatcattgactggcaccaccgttccacagggctgcaggctgacaccgaagccaaaatgaagggcctggccaaacccacgacctctgaggtcatgctagagcggcagcggtcgctgaagaaatccaagaaagagaatgactttgctcagtctggtcaggatgcagtgcctgaaagcccatccaagttgagttctaagaggcccaaggggatcctgaagaagcgaagcaacagcgagcatcgctctcacagcactggcttcattgaaggtgtagttggtcctgccttaccctctactttcaagatggagcaggacttgtgcaggactggcgtgctcctcccaagctcaccagaggcagaggtgccgggaaaactcagccccaagcagtcggccacgatgcccaagaaaggcatcttgaaaaagacccagcagagagaatcaggttactactcttccccagagcgcagtgagtcttcggagctgttggacagtaatgatgtgatgggcagcagcatcccctcccccagccccccggacccagccagggtaacctcccacagcctctcctgccggaggaagggcatcttgaaacacagcagcaaatactcagcgggcaccatggacccagccctggtcagccctgaaatgcccacactggaatccctgtcagagcctggtgtccctgccgagggcctctcccggagctacagccgcccttccagtgtcatcagcgatgacagcgtgctgtccagcgactcttttgacttgctggatttgcaggagaatcgccctgcccgccagcgcatccgcagctgcgtctctgcagaaaacttcctccagatccaggactttgaggggctccagaaccggccccggccccagtacctgaagcggtaccggaaccggctggcagacagcagcttctccctcctcacagacatggatgatgtgactcaggtctacaagcaagcgctggagatctgcagcaagctcaactagcattccagggcgcccaggggcgggcgggggtacgagggaggaaggggagcaagacttgggctcacaggctggttacctctttgctggctgtgacaacagactgaaaaaggattggcactgtctcacttggccaagtttgcagccttgagccaacacctaaaagggagaggtgggctcttctgccagttctgtcaattgtcagtcagaatttgggccctgtttggcatttgctttatggcacctcctagaggaccagctgtccaggggaggtggtattgaccggcactcagtgggtggagaggaagcatatgtggaaggagcatttccttagaaatgcttcattcatccagatgcttctggaggaggggcaggagacacttgggctgtttgccttgggcgagcccaaagaacttgccccttttctccttgcattagcaagctaggtctggctgcgtggagctggcaagtagatttcagcaacttgagcttgagttgatgatcaattaatagtggctgccagttgtgctggcgtaagtggcccacatcatggggaaggagtgctgtgattgactagtaatggctaccacgggaaagggaaggggaagcagtagcactaatgctatgtagttgtcatctttgatctggctaggccctgggaatcgggtttagtcatcctgtgggatctgtgttaactctttcatgccactggtgaggcatttgttaatttgctactcaactttgaggaaagacagggccttggtcagagagagaatgctctgaactctgctaaggacatagagtcagcccatggtgatttagctccttgctgttcacctcctctttcctgatgtctgccttgctctacagcacaacctcttgagggtggacagggagaaagatgatggtgtcagaggtcaaaactattatatatgacagggcacaagatggtctgtgatctttgcacagatgaatggaagttgatgcacaccaacaagaggcaacttgtcactttctttctcaatattaactggaatgctgcctcttgggttctcacctgcatggatgctttgagttggatgtgatactgtccatattctccagaggattacctggctgaaccattggctctgttcaccagtgacagatggtttccccatccactgagtgtagcatcctcagaggtaggcaagtttgcttctagggagttagcatgtagatgggatattgggatgaggaaaggaaaatcaggtagatggtgctttttttcccccaaatctaagtattctatgtcatggttttaaactttgccatgaactcctgggctttgggggaagagaaagttccattcatttaaatgaataaggtgttgaaagagtgcagggggttgggaggaagcatgtaagagagggaacatttccttagatgttacccagatggttctgggggagacagaaaagaggtgcggcaggactcttatcttaaaaagtaaacaaaacaaaacaaaacaaaacaaaaaaactagatatgtaatttctaaacacccagatcacaatgacaagatgccactccaaccatgggacaccttcatgatactaggtttgtacttcctggtctctgggatgacttcagattctgctggccaaggcaaattgaactcagttcaagatggccaccactggtagacgtgtagatagaaaagaggactggtcttgggaacatctttggaaaaaccaacaaacaatagttctagggagatgagaaaaaaattcaccttacagtgctaagaaagtgcattagaatggaattgccctttccttaaggagacagtttgggctctccccttgccaccggctctggtgttttggcttatgcgttccttcaggttgagctgagcagtgtgttatgggaagctgctcaatttcctttcattcaattccacctccttcctgaactctaatagaggttaaaagggaaaaaaaaaattctgtagatagcaaattgtgtgtgtgggggggggtgggggtgtgggtgcatggaggacaacctgcaactctgagctccctacttcctgcctcatttcatgcagtcttttctgaacagcctatgctgctgccctgctggccccttgtgcacggcagctggccgtgtccgtagctgtcagtatgacttagatctagctcctacctactggttgatgtgttttttccttttgccaagtgattgagtctgtttagtagtttccatcattctagtctttaagtaaaaatgacactattgaggaaagtcagtctactcccttcttcctccccccaaacacgtgttctcttttgtcaggaaactcagccagtgggctgtggcagagaaagtcctccactcagaggcagagactgagttaagtcataggtggccttaggcatctgcattgtttgcaggggttaagttttccttccagtgagggctggagggatgaattagctggtacctgaagccccgcttagctctgacactctgccaacatcctctgattctaggtgtggtgttgactgtcctttcaaggaaaaacttgcaatagagggaaaagccattaaagcagctccctgcttcatcattaagtcctgtcatccctaccagccaatcccagtcaaagaagttatgctttattcacttctgtggaattacaagtgagagacacttttaggacctgatggacaaagcaggagattcactgtcagctttcctggtcctctccttacttctgtgggccttgcaccgtcttagtttacacatctgccaaaggggtagaattacacttctttttacaggtaaatgtcaaggcacaatcagttttcaggaagtgcttcaagaccccaggtgaaatgaaaatgctaagtaccctctgaatggccatgcctgttaccaggtgctgcttcttcagatgatggggagcacttttcagggtgaaattcaggcgagttttgcccaggcctgctgtcttgagtacaaatgtgaatgatcgactgactgcttgttgccaaactggaaatgttctgtagggatttactggcatggtatcattcctagaagaaaaaaagagagaaacttgactgcacattaaaaaaaaaaaaatccacattgtgacttttatttaatttctattttttttggtaataaaaagttgacttttttatttgaatttgtcttttttatttattggtctgaaaggcatttcaaaggtattataataatatattggtgtaatttaattggtgcaacatgctttatggctcctgtcaaaattggttttcactcatttgattggtttgagcccagaacagcctacaggggaaaaacaagctggataaccacccaaagtgtttgtattttcgttggaaactgatttttgtttcattttggtttttgtttctgtttttatttttaaattaaataaattgcaatgaactg

SEQ ID NO: 82 - protein, 661 aa, Homo sapiens
MEGAAAPVAGDRPDLGLGAPGSPREAVAGATAALEPRKPHGVKRHHHKHNLKHRYELQETLGKGTYGKVKRATERFSGRVVAIKSIRKDKIKDEQDMVHIRREIEIMSSLNHPHIISIYEVFENKDKIVIIMEYASKGELYDYISERRRLSERETRHFFRQIVSAVHYCHKNGVVHRDLKLENILLDDNCNIKIADFGLSNLYQKDKFLQTFCGSPLYASPEIVNGRPYRGPEVDSWALGVLLYTLVYGTMPFDGFDHKNLIRQISSGEYREPTQPSDARGLIRWMLMVNPDRRATIEDIANHWWVNWGYKSSVCDCDALHDSESPLLARIIDWHHRSTGLQADTEAKMKGLAKPTTSEVMLERQRSLKKSKKENDFAQSGQDAVPESPSKLSSKRPKGILKKRSNSEHRSHSTGFIEGVVGPALPSTFKMEQDLCRTGVLLPSSPEAEVPGKLSPKQSATMPKKGILKKTQQRESGYYSSPERSESSELLDSNDVMGSSIPSPSPPDPARVTSHSLSCRRKGILKHSSKYSAGTMDPALVSPEMPTLESLSEPGVPAEGLSRSYSRPSSVISDDSVLSSDSFDLLDLQENRPARQRIRSCVSAENFLQIQDFEGLQNRPRPQYLKRYRNRLADSSFSLLTDMDDVTQVYKQALEICSKLN

SEQ ID NO: 83 - DNA, 3608 bp, Homo sapiens
  CDS (1)...(2070)
atggcggcgcgcaccctgggccgcggcgtcgggaggctgctgggcagcctgcgagggctctcggggcagcccgcgcggccgccgtgcggggtgagcgcgccgcgcagggcggcctcgggaccctcgggcagcgctcccgcagttgcagcagcagcagcacagccaggctcgtatcccgcgctgagtgcacaggcagcccgggagccggccgccttctgggggcctctggcgcgggacactctcgtgtgggacacaccctaccacaccgtctgggactgcgacttcagcactggcaagatcggctggttcctgggaggccagttaaatgtctctgtcaactgcttggaccagcatgttcggaagtcccccgagagcgttgctttgatctgggagcgcgatgagcctggaacggaagtgaggatcacctacagggaactactggagaccacgtgccgcctggccaacacgctgaagaggcatggagtccaccgtggggaccgtgttgccatctacatgcccgtgtccccattggctgtggcagcaatgctggcctgtgccaggatcggagctgtccacacagtcatctttgctggcttcagtgcagagtccttggctgggaggatcaatgatgccaagtgcaaggtggttatcaccttcaaccaaggactccggggtgggcgcgtggtggagctgaagaaaatagtggatgaggctgtgaagcactgccccaccgtgcagcatgtcctggtggctcacaggacagacaacaaggtccacatgggggatctggacgtcccgctggagcaggaaatggccaaggaggaccctgtttgcgccccagagagcatgggcagtgaggacatgctcttcatgctgtacacctcagggagcaccggaatgcccaagggcatcgtccatacccaggcaggctacctgctctatgccgccctgactcacaagcttgtgtttgaccaccagccaggtgacatctttggctgtgtggccgacatcggttggattacaggacacagctacgtggtgtatgggcctctctgcaatggtgccaccagcgtcctttttgagagcaccccagtttatcccaatgctggtcggtactgggagacagtagagaggttgaagatcaatcagttctatggcgccccaacggctgtccggctgttgctgaaatacggtgatgcctgggtgaagaagtatgatcgctcctccctgcggaccctggggtcagtgggagagcccatcaactgtgaggcctgggagtggcttcacagggtggtgggggacagcaggtgcacgctggtggacacctggtggcagacagaaacaggtggcatctgcatcgcaccacggccctcggaagaaggggcggaaatcctccctgccatggcgatgaggcccttctttggcatcgtccccgtcctcatggatgagaagggcagcgtcgtggagggcagcaacgtctccggggccctgtgcatctcccaggcctggccgggcatggccaggaccatctatggcgaccaccagcgatttgtggacgcctacttcaaggcctacccaggctattacttcactggagacggggcttaccgaactgagggcggctattaccagatcacagggcggatggatgatgtcatcaacatcagtggccaccggctggggaccgcagagattgaggacgccatcgccgaccaccctgcagtaccagaaagtgctgtcattggctacccccacgacatcaaaggagaagctgcctttgccttcattgtggtgaaagatagtgcgggtgactcagatgtggtggtgcaggagctcaagtccatggtggccaccaagatcgccaaatatgctgtgcctgatgagatcctggtggtgaaacgtcttccaaaaaccaggtctgggaaggtcatgcggcggctcctgaggaagatcatcactagtgaggcccaggagctgggagacactaccaccttggaggaccccagcatcatcgcagagatcctgagtgtctaccagaagtgcaaggacaagcaggctgctgctaagtgagctggcaccttgtggggctcttgggatgggcgggcacccaagccctggcttgtccttcccagaaggtacccctgaggttggcgtcttcctacgtcccagaagcagcccccaccccacacatgacccacaccgccctcacgtgaagctgggctgagagccctttctcccatccattggaggtcccaggagtgtcacccatggagaggctatgcgacatggctagggctggttctgccatctgagtttggtttcctggaatgaaaaggcattgccatctccattcctctgccctcttgagccagcacaggaaggtgaggccctgggatagcgcgcctgctcagataacacagagctagttagctagtagcaaccgtgttttctccagatctgtctagatacaaaggtcagaaatcttatttttatacttttatattgtggaagaacagcatgcaacactcacatgtagtgtgtggatttacttgaacatgttctttttaacatgtagttatgaaaatctccttttttgcctctactggtgaggaaacatgaggatcagaggccacatttttaattattgttagtgtatttggaagtctgaattggagatgtttgtacctctgtctaaacagttcccttgagaacttccaagcctccggcatcttttcctggtgagtgtttctcctgtgcttggttgtgtataatggagctaactcctaagcggtggggtgaatgtggccgccttagttctgaagctactccagttatgttctgtttcttcaagctgtgatccagaaagatttttgtgcccccagatgcctcttgataggagaggcaacatactccaaatagttgggttcttcagggaagctattagaaactcaggtgacttgttagagcactaacttggtcagagccaaatcctggcaaacgctgcctgaccttcactctgtggttggggcagtgagaaccactgaggtccaatgatgagacttggaggtctggatccagtctctctttgttttaatgtgacttaggtgctgtcaacattagcaagataatggaaatcacgacgccagtgggtgcttacctccctgctaggcatgcaggggctggcggttggcaggggaaggaggcccagtgagccgggtcccttaggggagggagagtttgtcctctttgccccacagtctacccttcagggccttgtggcagtgccagtgttcggggggtgtctgggccactgagtacccactcggtcgtggttgtgctggcctcttgggtgagtgaacctgtgaagcccaggaggtggtgttggctgcagggtacacaaatactgagtggtggtcttttgttacaggcttagcaacaaagctgtgccctgggcatggggggctgtagtgtagctacagttgtgcgtttgtgaaatggcttagctttccatgttgctgagaggaacctggacatggtcccgggcatctgaatgatctgtaggggagggagttcaaataaagctttattttgttcaaaaaaaaaaaaaa

SEQ ID NO: 84 - protein, 689 aa, Homo sapiens [sequence omitted]

SEQ ID NO: 85 - DNA, 1738 bp, Homo sapiens
  CDS (70)...(1641)
gaattcctcgcctcgggacccgcggtccccgctcttgctggatttttcaagccacattcaattgataggatgaaaaaatttaagagaaggctatccctcacactccgaggaagtcagactattgatgaatcattgtctgaattggctgaacaaatgactattgaagaaaacagcagcaaggataatgagcctattgtgaagaatggcaggcctccaacgtctcacagtatgcattccttcctccaccagtacacaggatctttcaagaagcccccattgcggagaccacacagtgttattggagggagccttggctccttcatggcaatgcccagaaatggaagcagattagatattgttcatgaaaatctaaaaatgggatcagatggtgagagtgaccaagcttctgggacatcatctgatgaagtccagtcacctacaggtgtttgtctcagaaatcgtatacatagacggatctcaatggaggatttaaataagcggttatcactgcctgcagacatcagaatacctgatggatatcttgaaaagttgcagataaacagtccaccatttgaccaaccaatgagtcgaaggtctcgtagagcttccttatcagaaattggctttggaaaaatggaaacctacatcaaattggaaaagcttggagagggtacatatgcaacagtatataaaggaagaagtaaattgacagagaatttggtggcattaaaagagatccgattggaacatgaagaaggtgcaccctgcacagctataagagaagtttcactattaaaggatttaaaacatgcaaatatagtaaccttacatgacattgttcacacagataaatccttgactttggtgtttgagtatctggataaagacctgaaacagtacatggatgactgtggaaacatcatgagtatgcacaacgtaaagctgtttctgtaccaaattctacgtggtttggcatattgccatagaagaaaggtattgcatcgagacttgaaaccacagaacctcctcattaatgagaaaggagaattaaagctagcagattttggactagcccgagccaagtcagttcccacaaagacctactcaaatgaagttgtcacactatggtaccggccacctgatgtgcttcttggttcctcggagtacttaacacagattgacatgtggggtgttggttgcattttctttgaaatggcttctggaagacctttatttccaggatcaaccgtggaagatgaactgcacttaattttccgactgctaggaactccatctcaggaaacttggccaggtatttcttcaaatgaggagttcaagaactacaactttccaaaatataaaccagagcctctaattaaccacgcacccaggttagactctgaaggaattgagttgataagaaaatttcttcagtatgaatctaagaaaagggtttcagctgaagaggccatgaaacatgtgtactttcgaagtctgggaccaagaatacatgctttaccagaaagtgtatcaatattcagtttgaaagagattcagttgcaaaaggacccgggttttcgaaattcttcttatccagagacaggacatgggaagaacagaagacagagcatgctcttttaagtctgataacatggtttcaagcccagcccccagcctttcttaccaatcaaggactcagaactgaaggcaattatttcttttggtggacttggaatct

SEQ ID NO: 86 - protein, 523 aa, Homo sapiens [sequence omitted]

SEQ ID NO: 87 - DNA, 1500 bp, Homo sapiens
  CDS (1)...(1500)
atggcttcgaccaccacctgcaccaggttcacggacgagtatcagcttttcgaggagcttggaaagggggcattctcagtggtgagaagatgtatgaaaattcctactggacaaggatatgctgccaaaattatcaacaccaaaaagctttctgctagggatcatcagaaactagaaagagaagctagaatctgccgtcttttgaagcaccctaatattgtgcgacttcatgatagcatatcagaagagggctttcactacttggtgtttgatttagttactggaggtgaactgtttgaagacatagtggcaagagaatactacagtgaagctgatgccagtcattgtatacagcagattctagaaagtgttaatcattgtcacctaaatggcatagttcacagggacctgaagcctgagaatttgcttttagctagcaaatccaagggagcagctgtgaaattggcagactttggcttagccatagaagttcaaggggaccagcaggcgtggtttggttttgctggcacacctggatatctttctccagaagttttacgtaaagatccttatggaaagccagtggatatgtgggcatgtggtgtcattctctatattctacttgtggggtatccacccttctgggatgaagaccaacacagactctatcagcagatcaaggctggagcttatgattttccatcaccagaatgggacacggtgactcctgaagccaaagacctcatcaataaaatgcttactatcaaccctgccaaacgcatcacagcctcagaggcactgaagcacccatggatctgtcaacgttctactgttgcttccatgatgcacagacaggagactgtagactgcttgaagaaatttaatgctagaagaaaactaaagggtgccatcttgacaactatgctggctacaaggaatttctcagcagccaagagtttgttgaagaaaccagatggagtaaaggagtcaactgagagttcaaatacaacaattgaggatgaagatgtgaaagcacgaaagcaagagattatcaaagtcactgaacaactgatcgaagctatcaacaatggggactttgaagcctacacaaaaatctgtgacccaggccttactgcttttgaacctgaagctttgggtaatttagtggaagggatggattttcaccgattctactttgaaaatgctttgtccaaaagcaataaaccaatccacactattattctaaaccctcatgtacatctggtaggggatgatgccgcctgcatagcatatattaggctcacacagtacatggatggcagtggaatgccaaagacaatgcagtcagaagagactcgtgtgtggcaccgccgggatggaaagtggcagaatgttcattttcatcgctcggggtcaccaacagtacccatcaagccaccctgtattccaaatgggaaagaaaacttctcaggaggcacctctttgtggcaaaacatctga

SEQ ID NO: 88 - protein, 499 aa, Homo sapiens [sequence omitted]

SEQ ID NO: 89 - DNA, 6014 bp, Homo sapiens
  CDS (267)...(2165)
cccatttccagctccggagcgggcggctgcgccccgctcgtcgaggagctgcgctcacctcaggggcgggcccccgcctgcgttcgcggcgccagcagaagactgatttttggaaatatgtatttgggagacagtcacgtcctattgaataccttgtgctggtgctgccatcgaaaaatctggttacactctggggaggactgctaccactgcagaactgaaccacttcggccgtgagatgagtgtccggcctgagcaggcacaccatgaatagatacacaacaatcaggcagctcggggatggaacctacggttccgtcctgctgggaagaagcattgagtctggggagctgatcgctattaaaaaaatgaaaagaaaattttattcctgggaggaatgcatgaaccttcgggaggttaagtctttaaagaagctcaaccatgccaatgtagtcaaattaaaagaagttatcagggaaaatgatcatctttattttatcttcgagtacatgaaggaaaatctttaccagctcattaaagagagaaataagttgtttcctgagtctgctataaggaatatcatgtatcagatattacaaggactcgcatttattcacaaacacggcttctttcatcgagacttaaagcctgagaacctcctctgcatgggaccagaacttgtgaaaattgcagactttggtttggcccgagaaatacgatcaaaacctccatatacagattatgtatctaccagatggtacagggctccagaagtactcctgaggtctaccaactacagctcccccattgacgtctgggcggtgggctgcatcatggcagaagtttacaccctcaggccactcttccctggagccagtgaaattgacacaatattcaaaatttgccaagtgctggggacaccaaaaaagactgactggcctgaaggctatcaactttcaagtgcaatgaacttccgttggccacagtgtgtacccaataacttaaagaccttgattcccaatgctagcagtgaagcagtccagctcctgagagacatgcttcagtgggatcccaagaaacgaccaacagctagtcaggcacttcgatatccttacttccaagttggacacccactaggcagcaccacacaaaaccttcaggattcagaaaaaccacagaaaggcatcctggaaaaggcaggcccacctccttatattaagccagtcccacctgcccagccaccagccaagccacacacacgaatttcttcacgacagcatcaagccagccagccccctctgcatctcacgtacccctacaaagcagaggtctccaggacagatcacccaagccatctccaggaggacaagccaagcccgttgcttttcccatccctccacaacaagcatccacagtcgaaaatcacagctggcctggagcacaaaaatggtgagataaagccaaagagtaggagaaggtggggtcttatttccaggtcaacaaaggattcagatgattgggctgacttggatgacttggatttcagtccatccctcagcaggattgacctgaaaaacaagaaaagacagagtgatgacactctctgcaggtttgagagtgttttggacctgaagccctctgagcctgtgggcacaggaaacagtgcccccacccagacgtcatatcagcggcgagacacgcccaccctgagatctgcagccaagcagcactatttgaagcactctcgatacttgcctgggatcagtataagaaatggcatactctcgaatccaggcaaggaatttattccacctaatccatggtctagttctggcttgtctggaaaatcttcagggacaatgtcagtaatcagcaaagtaaattcagttggttccagctctacaagttctagtggactgactggaaactatgtcccttcctttctgaaaaaagaaatcggttctgctatgcagagggtacacctagcacctattccagacccttcccctggttattcctccctgaaggccatgagacctcatcctgggcgaccattcttccacacccagcctagaagcactcctgggttgataccacggcctccagccgcccagccagtgcatggccggacagactgggcttccaagtacgcatctcggcgatgactgtctgccttggtgatgaatctcttcctagggagaagcaggatactttccctcagctgactggtgttctacctgcaagatgtgcagagggcataaaagcaaatcaacactttatagttattcttctgaactaagacatgtcaatattcttttttaaagtttttttttaaaatattgatttgaatgcagtaggcttttttgtataaaattattttattctaaaactgggtcccattattttcttaaacaacagcattttgtatatatggattatgttttagcattttatacagtcaactttgtaatgaactttttaaaaattaattgattttcctttggggttccagataatattttctacagattttgaaaaatgtaataatattaatgcagtattgcaacaggggtgcaatttaaggctatgtgatagagggttatttactcagtgtgtgcagatatttatgaagtggtgaaatttcaagtgtggctcactaggtacttcaggccttcttggactgttgttagaaaagtgatcctctgcttttcttagtaggtcattggtttgatttttggataccactctgctgttctaaaaggactattatattatataattcactttgttttacttttgttccccagatgaaagaactctaagtaaatacattttaaaaaatttttctgacaccctttaatgtggttgcagatctcagatgaaaccaagcttaattatactatgccattatattctaatttattccatttttgaaatcaagttgtatgtgtaccaataaaagagatttctgcttcaaaaggctctcaacatgaaggttaacacagtcaatcaaacttacattcctgccaagatgcatggccaaaaaactaagtatcaaagcagcagaaggtttttgattatagtaactgagatggaattttgtgcctagctcagttctccagatctggctaggagcagtcaatgactaatgttctgtcctagccaaattctcaggacaatttggggagcagaaagagttatggcagaggttccactcatctacaaagtcacagtcacatgccacatttgatctcctaaccctggtgtagtttctttcaagagtgagaactttatttgttgggcagaggctgttccattgagaggaatgtttacagcagtttcaaaaatgacaaagtcagtttggagacagaaaaagacaaaaggtccagtctcatccatctctatatggtacatttgcctcacttatggttgccttaaaggcaagagggaaggtcaccatcagtgaacgcaatgcaatctcaacagtgtattgattcatattctcctagggctcaaactactctctattggttccaggataatgacaaattgaaccatatgtaagtaatcttttattttttattttttttttgagacagagtctcactctgtcacccaggctggagtgcagtggcgcgatcttagctctctgcaacctctgcctcccaggttcaagcctcctgagtaactgggactacaggcgcccgccaccacgcccagctaattttttgtatttttagtagagacggggtttcactgtgttagccaggacggcctcgatctcctgacctcgtgatccaccctcctccacctcccaaagtactgggattacaggcatgagccactgcacccagccaagtgatcatttttataggttaaaatgataggtgaaatgaatatagacactttcatatggttcaacctaatgacttggtaaattattgccttggtgtattaataatatgttgcattctgaacaaataaccatggcttccaaagggccctaacctaaaatcggagagtaatttatgctttggagaatttgactcaaatatatacttgaccaagcaccatgatccctaggggcatgagaaaagcacataatggatgtggatgtgataggtggtcttttcctgttaacaagctggcagcaaagcttcagaaaatatatatgcaagcacaacttgaagctgaattcatttctgtattatattctcaactcgttatctaaagcatcagaacatgtgttttcagagatgagtcctttactataaggttaatatttattttcattttctgtattatatatgaaaagtaaattaatgtgaaacctggcccagcttgctggaaagcaggttttaaattgtaaatattccttagaggagcaaatggattgtttaataccatagtctcagtaatctagcttatataaggtcattacattttttaactgaaaaacctagttacctgattattgcacattataaaattgtttttctaatactttatagggcccaacttcagaaaatacttcgcttttttctttttatgctttcgtttgtttaccagcaagcaacttccctggggaagccaaacacatattcataaaaaaaatcaagtagctgatgtgcagttgagaaaactagaggactgaaaaaacaaattttaactagcaaatgctgtgaattactcttcctccccttctctgaaatgggtaaaggacaaattgtgtaaaaaaacctatgcactatagaagggaatagtaaccatttcttttgtctctctgtttctgttctgactgagaacctgcagccatttcttgttacatgaaaacaaaatgctacttgttacctctattttttgttactatacaattatgaaatgtaatgtaagacaccaacagaaatgatatacctgtaactgtacctatcaggactatacctcatttacagtcagaaagcttactgggatgtcaggaaatgatacagggttggttctcatttcgtgccgaaatgagacagaaattcagtgacgaaggtgcgttgtaggggtattgatgtgccccaggtagtgccagcagagtagggaaaactgcatttgcataaaaactactcttgacatgattgttcattttacaaaaaaattccattaattaccaagccctcacccagcccatgtgtgataggatttatgtaggaagaaacttgattttcaaataattttttaaatgtatctcttgcctaaaggactatatacatctaataaagtaacactgtgtcatcttctggagttatcaaaaattgtatacaatcaagacaacacaagaattattttatttttgagtgcaaatacaggtactgttggagttgatgggcaccatgctttctcatgaagtagcatttccctaccatcaagccattgttttgtgccattcaggagaggaaaaaaaggaatttatgctgtacatttcagttcagtgtatgaccaaaagcaatatgtttataagaagatgtttgacatactaattattttatatcatttaaaccatactgtagcaacataatatatggagctaatttgtagaattatttttacgatttccaaacaaatgtactgtactgttatataatttattgtgaggaccttctcatggaagccattaggaaaacaaactagaggtaaatatcacattaatctgtattatcaatttctcatagacactgtgctaatgtgaattttaaatgacctgcatcaagtcttctgatctcagataactcagtacagatagcaattagtcagctgatttgattacaatggagtaaccgacaatatatttatttataaagcacatattcataataacgagaagaattcagaaaaccacttaagcaagacccttctgaaataaaaaatgttgctttttaaatagtttgtcctaaggtgtttaaaacatgtcaaccttatgtaaggaaaaatttcctggtccaaataaagttgaagtttaagaaaaattg

SEQ ID NO: 90 - protein, 632 aa, Homo sapiens
MNRYTTIRQLGDGTYGSVLLGRSIESGELIAIKKMKRKFYSWEECMNLREVKSLKKLNHANVVKLKEVIRENDHLYFIFEYMKENLYQLIKERNKLFPESAIRNIMYQILQGLAFIHKHGFFHRDLKPENLLCMGPELVKIADFGLAREIRSKPPYTDYVSTRWYRAPEVLLRSTNYSSPIDVWAVGCIMAEVYTLRPLFPGASEIDTIFKICQVLGTPKKTDWPEGYQLSSAMNFRWPQCVPNNLKTLIPNASSEAVQLLRDMLQWDPKKRPTASQALRYPYFQVGHPLGSTTQNLQDSEKPQKGILEKAGPPPYIKPVPPAQPPAKPHTRISSRQHQASQPPLHLTYPYKAEVSRTDHPSHLQEDKPSPLLFPSLHNKHPQSKITAGLEHKNGEIKPKSRRRWGLISRSTKDSDDWADLDDLDFSPSLSRIDLKNKKRQSDDTLCRFESVLDLKPSEPVGTGNSAPTQTSYQRRDTPTLRSAAKQHYLKHSRYLPGISIRNGILSNPGKEFIPPNPWSSSGLSGKSSGTMSVISKVNSVGSSSTSSSGLTGNYVPSFLKKEIGSAMQRVHLAPIPDPSPGYSSLKAMRPHPGRPFFHTQPRSTPGLIPRPPAAQPVHGRTDWASKYASRR

SEQ ID NO: 91 - DNA, 2980 bp, Homo sapiens
  CDS (86)...(2422)
gtcgacccacgcgtccgcggacgcgtgggcggacgcgtgggcggacgcgtggggggggaccggtcgggccgggaccaagggcaccatgtcgtccggggccaaggagggaggtgggggctctcccgcctaccacctcccccacccccacccccacccaccccagcacgcccaatatgtgggcccctatcggctggagaagacgctgggcaaaggacagacagggctggttaaactcggggtccactgcatcacgggtcagaaggtcgccatcaagatcgtgaaccgggagaagctgtcggagtcggtgctgatgaaggtggagcgggagatcgccatcctgaagctcatcgaacacccacatgtcctcaagctccacgacgtctacgagaacaagaaatatttgtacctggttctggagcacgtctcggggggtgagctattcgactacctggtaaagaaggggagactgacgcccaaggaggcccgaaagttcttccgccagattgtgtctgcgctggacttctgccacagctactccatctgccacagagacctaaagcccgagaacctgcttttggatgagaaaaacaacatccgcattgcagacttcggcatggcgtccctgcaggtgggggacagcctcctggagaccagctgcgggtccccccattatgcgtgtccagaggtgattaagggggaaaaatatgatggccgccgggcagacatgtggagctgtggagtcatcctcttcgccctgctcgtgggggctctgccctttgatgacgacaacctccgccagctgctggagaaggtgaaacggggcgtcttccacatgccccacttcattcctccagattgccagagcctcctgaggggaatgatcgaagtggagcccgaaaaaaggctcagtctggagcaaattcagaaacatccttggtacctaggcgggaaacacgagccagacccgtgcctggagccagcccctggccgccgggtagccatgcggagcctgccatccaacggagagctggaccccgacgtcctagagagcatggcatcactgggctgcttcagggaccgcgagaggctgcatcgcgagctgcgcagtgaggaggagaaccaagaaaagatgatatattatctgcttttggatcggaaggagcggtatcccagctgtgaggaccaggacctgcctccccggaatgatgttgaccccccccggaagcgtgtggattctcccatgctgagccgtcacgggaagcggcgaccagagcggaagtccatggaagtcctgagcatcaccgatgccgggggtggtggctcccctgtacccacccgacgggccttggagatggcccagcacagccagagatcccgtagcgtcagtggagcctccacgggtctgtcctccagccctctaagcagcccaaggagtccggtcttttccttttcaccggagccgggggctggagatgaggctcgaggcgggggctccccgacttccaaaacgcagacgctgccttctcggggccccaggggtgggggcgccggggagcagcccccgccccccagtgcccgctccacacccctgcccggccccccaggctccccgcgctcctctggcgggacccccttgcactcgcctctgcacacgccccgggccagtcccaccgggaccccggggacaacaccaccccccagccccggcggtggcgtcgggggagccgcctggaggagtcgtctcaactccatccgcaacagcttcctgggctcccctcgctttcaccggcgcaagatgcaggtccctaccgctgaggagatgtccagcttgacgccagagtcctccccggagctggcaaaacgctcctggttcgggaacttcatctccttggacaaagaagaacaaatattcctcgtgctaaaggacaaacctctcagcagcatcaaagcagacatcgtccatgcctttctgtcgatccccagcctgagtcacagtgtgctgtcacagaccagcttcagggccgagtacaaggccagtggcggcccctccgtcttccaaaagcccgtccgcttccaggtggacatcagctcctctgagggtccagagccctccccgcgacgggacggcagcggaggtggtggcatctactccgtcaccttcactctcatctcgggtcccagccgtcggttcaagcgagtggtggagaccatccaggcacagctcctgagcactcatgaccagccctccgtgcaggccctggcagacgagaagaacggggcccagacccggcctgctggtgccccaccccgaagcctgcagcccccacccggccgcccagacccagagctgagcagctctccccgccgaggcccccccaaggacaagaagctcctggccaccaacgggacccctctgccctgaccccacggggccggggagggaggggacccccctccaccccccttccgtgccccccaactgtgaatctgtaaataaggcccaaggaacatgtcgggaggggggtggacacaaaaaccggccttgccctgcagggatggggctccacaggccgtgcccaactgggggtggttctaggggaacagggggcgggggagctgtttctattttatttattgattaatttattattttatttattgatcaatctctctgcggggtggggtgggggagggacgggagctggttggggtggcttagcagatccggacagggccctctgtccctgtgtcgtccccaaccccctcttcccgggcccctcctcccctggtcctccccccacgaccttctgtacggatttgctctccggaaggaattctggtttcgcgtgatcctgcctgcgtccgtgtctctgattccgccggcggcaaaaaaaaaaaaaaaaaaaaaaaaaaaaaaagataataataataaatagccttgatcagggaaaaaaaaaaaaaaaaaaaagggcggccgcta

SEQ ID NO: 92 - protein, 778 aa, Homo sapiens
MSSGAKEGGGGSPAYHLPHPHPHPPQHAQYVGPYRLEKTLGKGQTGLVKLGVHCITGQKVAIKIVNREKLSESVLMKVEREIAILKLIEHPHVLKLHDVYENKKYLYLVLEHVSGGELFDYLVKKGRLTPKEARKFFRQIVSALDFCHSYSICHRDLKPENLLLDEKNNIRIADFGMASLQVGDSLLETSCGSPHYACPEVIKGEKYDGRRADMWSCGVILFALLVGALPFDDDNLRQLLEKVKRGVFHMPHFIPPDCQSLLRGMIEVEPEKRLSLEQIQKHPWYLGGKHEPDPCLEPAPGRRVAMRSLPSNGELDPDVLESMASLGCFRDRERLHRELRSEEENQEKMIYYLLLDRKERYPSCEDQDLPPRNDVDPPRKRVDSPMLSRHGKRRPERKSMEVLSITDAGGGGSPVPTRRALEMAQHSQRSRSVSGASTGLSSSPLSSPRSPVFSFSPEPGAGDEARGGGSPTSKTQTLPSRGPRGGGAGEQPPPPSARSTPLPGPPGSPRSSGGTPLHSPLHTPRASPTGTPGTTPPPSPGGGVGGAAWRSRLNSIRNSFLGSPRFHRRKMQVPTAEEMSSLTPESSPELAKRSWFGNFISLDKEEQIFLVLKDKPLSSIKADIVHAFLSIPSLSHSVLSQTSFRAEYKASGGPSVFQKPVRFQVDISSSEGPEPSPRRDGSGGGGIYSVTFTLISGPSRRFKRVVETIQAQLLSTHDQPSVQALADEKNGAQTRPAGAPPRSLQPPPGRPDPELSSSPRRGPPKDKKLLATNGTPLP

SEQ ID NO: 93 - DNA, 1048 bp, Homo sapiens
  CDS (4)...(1044)
gggatggcgcggaagtcgaacttgcctgtgcttctcgtgccgtttctgctctgccaggccctagtgcgctgctccagccctctgcccctggtcgtcaacacttggccctttaagaatgcaaccgaagcagcgtggagggcattagcatctggaggctctgccctggatgcagtggagagcggctgtgccatgtgtgagagagagcagtgtgacggctctgtaggctttggaggaagtcctgatgaacttggagaaaccacactagatgccatgatcatggatggcactactatggatgtaggagcagtaggagatctcagacgaattaaaaatgctattggtgtggcacggaaagtactggaacatacaacacacacacttttagtaggagagtcagccaccacatttgctcaaagtatggggtttatcaatgaagacttatctaccagtgcttctcaagctcttcattcagattggcttgctcagaattcccagccaaattattggaggaatgttataccagatccctcaaaatactgcggaccctacaaaccacctggtatcttaaagcaggatattcctatccataaagaaacagaagatgatcgtggtcatgacactattggcatggttgtaatccataagacaggacatattgctgctggtacatctacaaatggtataaaattcaaaatacatggccgtgtaggagactcaccaatacctggagctggagcctatgctgacgatactgcaggggcagccgcagccactgggaatggtgatatattgatgcgcttcctgccaagctaccaagctgtagaatacatgagaagaggagaagatccaaccatagcttgccaaaaagtgatttcaagaatccagaagcattttccagaattctttggggctgttatatgtgccaatgtgactggaagttacggtgctgcttgcaataaactttcaacatttactcagtttagtttcatggtttataattccgaaaaaaatcagccaactgaggaaaaagtggactgcatctaatcca

SEQ ID NO: 94 - protein, 346 aa, Homo sapiens [sequence omitted]

SEQ ID NO: 95 - DNA, 1621 bp, Homo sapiens
  CDS (1)...(1422)
  misc_feature (1)...(1621): n = A,T,C or G
atggcgaccgccacggagcagtgggttctggtggagatggtacaggcgctttacgaggctcctgcttaccatcttattttggaagggattctgatcctctggataatcagacttcttttctctaagacttacaaattacaagaacgatctgatcttacagtcaaggaaaaagaagaactgattgaagagtggcaaccagaacctcttgttcctcctgtcccaaaagaccatcctgctctcaactacaacatcgtttcaggccctccaagccacaaaactgtggtgaatggaaaagaatgtataaacttcgcctcatttaattttcttggattgttggataaccctagggttaaggcagcagctttagcatctctaaagaagtatggcgtggggacttgtggacccagaggattttatggcacatttgatgttcatttggatttggaagaccgcctggcaaaatttatgaagacagaagaagccattatatactcatatggatttgccaccatagccagtgctattcctgcttactctaaaagaggggacattgtttttgtagatagagctgcctgctttgctattcagaaaggattacaggcatcccgtagtgacattaagttatttaagcataatgacatggctgacctcgagcgactactaaaagaacaagagatcgaagatcaaaagaatcctcgcaaggctcgtgtaactcggcgtttcattgtagtagaaggattgtatatgaatactggaactatttgtcctcttccagaattggttaagttaaaatacaaatacaaagcaagaatcttcctggaggaaagcctttcatttggagtcctaggagagcatggccgaggagtcactgaacactatggaatcaatattgatgatattgatcttatcagtgccaacatggagaatgcacttgcttctattggaggtttctgctgtggcaggtcttttgtaattgaccatcagcgactttccggccagggatactgcttttcagcttcgttacctcccctgttagctgctgcagcaattgaggccctcaacatcatggaagagaatccaggtatttttgcagtgttgaaggaaaagtgcggacaaattcataaagctttacaaggcatttctggattaaaagtggtgggggagtccctttctccagcctttcacctacaactggaagagagcactgggtctcgcgagcaagatgtcagactgcttcaggaaattgtagatcaatgcatgaacagaagtattgcattaactcaggcgcgctacttggagaaagaagagaagtgtctccctcctcccagcattcgggttgtggtcacggtggaacaaacagaggaagaactggagagagctgcgtccaccatcaaggaggtagcccaggccgtcctgctctaggcagagtcccgggaccatggcctcctgccacacaacacgcagagaggactcaagactcccgctggccatgggagttgcttgnaaaggagagcaagaacatgtggggtcttttgatagggttgtttacccaantggtgttcagttttnggacccatttgttgttgaccatgagnagggttgcttattttttttttaantt

SEQ ID NO: 96 - protein, 473 aa, Homo sapiens
MATATEQWVLVEMVQALYEAPAYHLILEGILILWIIRLLFSKTYKLQERSDLTVKEKEELIEEWQPEPLVPPVPKDHPALNYNIVSGPPSHKTVVNGKECINFASFNFLGLLDNPRVKAAALASLKKYGVGTCGPRGFYGTFDVHLDLEDRLAKFMKTEEAIIYSYGFATIASAIPAYSKRGDIVFVDRAACFAIQKGLQASRSDIKLFKHNDMADLERLLKEQEIEDQKNPRKARVTRRFIVVEGLYMNTGTICPLPELVKLKYKYKARIFLEESLSFGVLGEHGRGVTEHYGINIDDIDLISANMENALASIGGFCCGRSFVIDHQRLSGQGYCFSASLPPLLAAAAIEALNIMEENPGIFAVLKEKCGQIHKALQGISGLKVVGESLSPAFHLQLEESTGSREQDVRLLQEIVDQCMNRSIALTQARYLEKEEKCLPPPSIRVVVTVEQTEEELERAASTIKEVAQAVLL

SEQ ID NO: 97 - DNA, 2279 bp, Homo sapiens
  CDS (233)...(1750)
gaattcggggtggcgagaggggcggggtggccggggctgtctccacttggccccgctcccggcccgccccgccgccgccccccggatgagggtatatattcggagtgagcgcgggaccgatgagtggccgcgccgaaggagctggagacggtcgtagctgcggtcgccgagaaaggtttacaggtacatacattacacccctatttctacaaagcttggctattagagcattatgaacattaatgacctcaaactcacgttgtccaaagctgggcaagagcacctactacgtttctggaatgagcttgaagaagcccaacaggtagaactttatgcagagctccaggccatgaactttgaggagctgaacttctttttccaaaaggccattgaaggttttaaccagtcttctcaccaaaagaatgtggatgcacgaatggaacctgtgcctcgagaggtattaggcagtgctacaagggatcaagatcagctccaggcctgggaaagtgaaggacttttccagatttctcagaataaagtagcagttcttcttctagctggtgggcaggggacaagactcggcgttgcatatcctaaggggatgtatgatgttggtttgccatcccgtaagacactttttcagattcaagcagagcgtatcctgaagctacagcaggttgctgaaaaatattatggcaacaaatgcattattccatggtatataatgaccagtggcagaacaatggaatctacaaaggagttcttcaccaagcacaagtactttggtttaaaaaaagagaatgtaatcttttttcagcaaggaatgctccccgccatgagttttgatgggaaaattattttggaagagaagaacaaagtttctatggctccagatgggaatggtggtctttatcgggcacttgcagcccagaatattgtggaggatatggagcaaagaggcatttggagcattcatgtctattgtgttgacaacatattagtaaaagtggcagacccacggttcattggattttgcattcagaaaggagcagactgtggagcaaaggtggtagagaaaacgaaccctacagaaccagttggagtggtttgccgagtggatggagtttaccaggtggtagaatatagtgagatttccctggcaacagctcaaaaacgaagctcagacggacgactgctgttcaatgcggggaacattgccaaccatttcttcactgtaccatttctgagagatgttgtcaatgtttatgaacctcagttgcagcaccatgtggctcaaaagaagattccttatgtggatacccaaggacagttaattaagccagacaaacccaatggaataaagatggaaaaatttgtctttgacatcttccagtttgcaaagaagtttgtggtatatgaagtattgcgagaagatgagttttccccactaaagaatgctgatagtcagaatgggaaagacaaccctactactgcaaggcatgctttgatgtcccttcatcattgctgggtcctcaatgcagggggccatttcatagatgaaaatagctctcgccttccagcaattccccgcttgaaggatgccaatgatgtaccaatccaatgtgaaatctctcctcttatctcctatgctggagaaggattagaaagttatgtggcagataaagaattccatgcacctctaatcatcgatgagaatggagttcatgagctggtgaaaaatggtatttgaaccagataccaagttttgtttgccacgataggaatagcttttatttttgatagaccaactgtgaacctacaagacgtcttggacaactgaagtttaaatatccacagggttttattttgcttgttgaactcttagagctattgcaaacttcccaagatccagatgactgaatttcagatagcatttttatgattcccaactcattgaaggtcttatttatataattttttccaagccaaggagaccattggccatccaggaaatttcgtacagctgaaatataggcaggatgttcaacatcagtttacttgcagctggaagcatttgtttttgaagttgtacatagtaataatatgtcattgtacatgttgaaaggtttctatggtactaaaagtttgttttattttatcaaacattaagcttttttaagaaaataattgggcagtgaaataaatgtatcttcttgtctctggaaaaaaaaaaaaaaaaaaaaaaaaaaaaaaaaaaaaaaaaaaaaaaacccgaattc

SEQ ID NO: 98 - protein, 505 aa, Homo sapiens
MNINDLKLTLSKAGQEHLLRFWNELEEAQQVELYAELQAMNFEELNFFFQKAIEGFNQSSHQKNVDARMEPVPREVLGSATRDQDQLQAWESEGLFQISQNKVAVLLLAGGQGTRLGVAYPKGMYDVGLPSRKTLFQIQAERILKLQQVAEKYYGNKCIIPWYIMTSGRTMESTKEFFTKHKYFGLKKENVIFFQQGMLPAMSFDGKIILEEKNKVSMAPDGNGGLYRALAAQNIVEDMEQRGIWSIHVYCVDNILVKVADPRFIGFCIQKGADCGAKVVEKTNPTEPVGVVCRVDGVYQVVEYSEISLATAQKRSSDGRLLFNAGNIANHFFTVPFLRDVVNVYEPQLQHHVAQKKIPYVDTQGQLIKPDKPNGIKMEKFVFDIFQFAKKFVVYEVLREDEFSPLKNADSQNGKDNPTTARHALMSLHHCWVLNAGGHFIDENSSRLPAIPRLKDANDVPIQCEISPLISYAGEGLESYVADKEFHAPLIIDENGVHELVKNGI

SEQ ID NO: 99 - DNA, 1740 bp, Homo sapiens
  CDS (177)...(1649)
ggaaagagccggtgaaggggcagaacaggcaggttccctcgacccaggaccccctgttcccaggctatggcccccagtgccctgtagacctggcaggccccccgtgcttgcgacccctatttgggggtctgggtggctactggagggccttgcagaggggcagagaaggcaggaccatgacatctagggcctctgaactttctccggggcgcagcgtgacggctggcatcatcattgttggagatgagatccttaagggacacactcaggacaccaacaccttctttctgtgccggacactgcgctccctaggggtccaggtttgccgagtctcagttgtacctgatgaggtagccaccattgcagctgaggtcacttctttctccaaccgcttcacccatgtcctcacagcagggggcatcggccccactcatgatgatgtgacctttgaggcagtggcacaggcctttggagatgagctgaagccacaccccaagttggaagcagccaccaaagccctaggaggggaaggctgggagaagctatcattggtgccctcctctgcccgcctgcattatggcacagatccttgcactggtcaacctttcagattccctctggtctccgtccgaaacgtctacctcttcccaggcattccagagctgctgcggcgggtgctggaggggatgaagggactattccaaaacccagctgttcagttccactcaaaggagctatatgtggctgctgatgaagcctccatcgcccccattctggctgaggcccaggcccactttggacgtaggcttggcctgggttcctaccctgactggggcagcaactactatcaggtgaagctgactctagactcagaggaagaaggacccctggaggaatgcttggcctacctgactgcccgtttgccccagggatcgctggtcccctacatgcccaacgctgtggagcaggccagtgaggctgtatacaaactcgctgaatcagggtcttctttggggaaaaaggtggcaggtgccgtacagaccattgagacctccctggctcagtacagcctcacccagctctgtgtgggcttcaacgggggcaaagactgcactgccctcctgcacctcttccatgcagctgtgcagaggaaattacctgatgttccaaaccccctccagatcctgtatatccgcagcatctcccctttccctgagctggaacagtttctacaggacactatcaagaggtataatctgcagatgttggaagctgggggcagcatgaagcaggccctgggtgaactgcaggcacggcacccccagctggaggctgtccttatgggcacccgccggactgacccctactcctgtagcctctgccctttcagccccactgacccaggctggcccgcattcatgcgcatcaacccactgctggactggacctacagagacatctgggattttctgcgtcagctgtttgtcccatactgtatcctgtatgaccgaggatacacatcactggggagtcgggagaataccgtgcggaacccggccctgaagtgcctgagcccaggaggacaccccacataccgtccagcctatctactggagaacgaagaagaggagcggaactcccgcacatgacctcccaccctaggagggagggaaggacaccgtcctagggtataacctggcaataaaccgtgcctctcactgtgaaaaaaaaaaaaaaaaa

SEQ ID NO: 100 - protein, 490 aa, Homo sapiens
MTSRASELSPGRSVTAGIIIVGDEILKGHTQDTNTFFLCRTLRSLGVQVCRVSVVPDEVATIAAEVTSFSNRFTHVLTAGGIGPTHDDVTFEAVAQAFGDELKPHPKLEAATKALGGEGWEKLSLVPSSARLHYGTDPCTGQPFRFPLVSVRNVYLFPGIPELLRRVLEGMKGLFQNPAVQFHSKELYVAADEASIAPILAEAQAHFGRRLGLGSYPDWGSNYYQVKLTLDSEEEGPLEECLAYLTARLPQGSLVPYMPNAVEQASEAVYKLAESGSSLGKKVAGAVQTIETSLAQYSLTQLCVGFNGGKDCTALLHLFHAAVQRKLPDVPNPLQILYIRSISPFPELEQFLQDTIKRYNLQMLEAGGSMKQALGELQARHPQLEAVLMGTRRTDPYSCSLCPFSPTDPGWPAFMRINPLLDWTYRDIWDFLRQLFVPYCILYDRGYTSLGSRENTVRNPALKCLSPGGHPTYRPAYLLENEEEERNSRT

SEQ ID NO: 101 - DNA, 3370 bp, Homo sapiens
  CDS (94)...(3048)
gcccccgcccggcccgccccgctctcctagtcccttgcaacctggcgctgcatccgggccactgtcccaggtcccaggtcccggcccggagctatggagcggcgctggcccctggggctagggctggtgctgctgctctgcgccccgctgcccccgggggcgcgcgccaaggaagttactctgatggacacaagcaaggcacagggagagctgggctggctgctggatcccccaaaagatgggtggagtgaacagcaacagatactgaatgggacacccctctacatgtaccaggactgcccaatgcaaggacgcagagacactgaccactggcttcgctccaattggatctaccgcggggaggaggcttcccgcgtccacgtggagctgcagttcaccgtgcgggactgcaagagtttccctgggggagccgggcctctgggctgcaaggagaccttcaaccttctgtacatggagagtgaccaggatgtgggcattcagctccgacggcccttgttccagaaggtaaccacggtggctgcagaccagagcttcaccattcgagaccttgcgtctggctccgtgaagctgaatgtggagcgctgctctctgggccgcctgacccgccgtggcctctacctcgctttccacaacccgggtgcctgtgtggccctggtgtctgtccgggtcttctaccagcgctgtcctgagaccctgaatggcttggcccaattcccagacactctgcctggccccgctgggttggtggaagtggcgggcacctgcttgccccacgcgcgggccagccccaggccctcaggtgcaccccgcatgcactgcagccctgatggcgagtggctggtgcctgtaggacggtgccactgtgagcctggctatgaggaaggtggcagtggcgaagcatgtgttgcctgccctagcggctcctaccggatggacatggacacaccccattgtctcacgtgcccccagcagagcactgctgagtctgagggggccaccatctgtacctgtgagagcggccattacagagctcccggggagggcccccaggtggcatgcacaggtcccccctcggccccccgaaacctgagcttctctgcctcagggactcagctctccctgcgttgggaacccccagcagatacggggggacgccaggatgtcagatacagtgtgaggtgttcccagtgtcagggcacagcacaggacggggggccctgccagccctgtggggtgggcgtgcacttctcgccgggggcccgggcgctcaccacacctgcagtgcatgtcaatggccttgaaccttatgccaactacacctttaatgtggaagcccaaaatggagtgtcagggctgggcagctctggccatgccagcacctcagtcagcatcagcatggggcatgcagagtcactgtcaggcctgtctctgagactggtgaagaaagaaccgaggcaactagagctgacctgggcggggtcccggccccgaagccctggggcgaacctgacctatgagctgcacgtgctgaaccaggatgaagaacggtaccagatggttctagaacccagggtcttgctgacagagctgcagcctgacaccacatacatcgtcagagtccgaatgctgaccccactgggtcctggccctttctcccctgatcatgagtttcggaccagcccaccagtgtccaggggcctgactggaggagagattgtagccgtcatctttgggctgctgcttggtgcagccttgctgcttgggattctcgttttccggtccaggagagcccagcggcagaggcagcagaggcacgtgaccgcgccaccgatgtggatcgagaggacaagctgtgctgaagccttatgtggtacctccaggcatacgaggaccctgcacagggagccttggactttacccggaggctggtctaattttccttcccgggagcttgatccagcgtggctgatggtggacactgtcataggagaaggagagtttggggaagtgtatcgagggaccctcaggctccccagccaggactgcaagactgtggccattaagaccttaaaagacacatccccaggtggccagtggtggaacttccttcgagaggcaactatcatgggccagtttagccacccgcatattctgcatctggaaggcgtcgtcacaaagcgaaagccgatcatgatcatcacagaatttatggagaatgcagccctggatgccttcctgagggagcgggaggaccagctggtccctgggcagctagtggccatgctgcagggcatagcatctggcatgaactacctcagtaatcacaattatgtccaccgggacctggctgccagaaacatcttggtgaatcaaaacctgtgctgcaaggtgtctgactttggcctgactcgcctcctggatgactttgatggcacatacgaaacccagggaggaaagatccctatccgttggacagcccctgaagccattgcccatcggatcttcaccacagccagcgatgtgtggagctttgggattgtgatgtgggaggtgctgagctttggggacaagccttatggggagatgagcaatcaggaggttatgaagagcattgaggatgggtaccggttgccccctcctgtggactgccctgcccctctgtatgagctcatgaagaactgctgggcatatgaccgtgcccgccggccacacttccagaagcttcaggcacatctggagcaactgcttgccaacccccactccctgcggaccattgccaactttgaccccagggtgactcttcgcctgcccagcctgagtggctcagatgggatcccgtatcgaaccgtctctgagtggctcgagtccatacgcatgaaacgctacatcctgcacttccactcggctgggctggacaccatggagtgtgtgctggagctgaccgctgaggacctgacgcagatgggaatcacactgcccgggcaccagaagcgcattctttgcagtattcagggattcaaggactgatccctcctctcaccccatgcccaatcagggtgcaaggagcaaggacggggccaaggtcgctcatggtcactccctgcgccccttcccacaacctgccagactaggctatcggtgctgcttctgcccgctttaaggagaaccctgctctgcaccccagaaaacctctttgttttaaaagggaggtgggggtagaagtaaaaggatgatcatgggagggagctcaggggttaatatatatacatacatacacatatatatattgttgtaaataaacaggaaatgattttctgcctccatcccacccatcagggctgcaggcact

SEQ ID NO: 102 - protein, 984 aa, Homo sapiens
MERRWPLGLGLVLLLCAPLPPGARAKEVTLMDTSKAQGELGWLLDPPKDGWSEQQQILNGTPLYMYQDCPMQGRRDTDHWLRSNWIYRGEEASRVHVELQFTVRDCKSFPGGAGPLGCKETFNLLYMESDQDVGIQLRRPLFQKVTTVAADQSFTIRDLASGSVKLNVERCSLGRLTRRGLYLAFHNPGACVALVSVRVFYQRCPETLNGLAQFPDTLPGPAGLVEVAGTCLPHARASPRPSGAPRMHCSPDGEWLVPVGRCHCEPGYEEGGSGEACVACPSGSYRMDMDTPHCLTCPQQSTAESEGATICTCESGHYRAPGEGPQVACTGPPSAPRNLSFSASGTQLSLRWEPPADTGGRQDVRYSVRCSQCQGTAQDGGPCQPCGVGVHFSPGARALTTPAVHVNGLEPYANYTFNVEAQNGVSGLGSSGHASTSVSISMGHAESLSGLSLRLVKKEPRQLELTWAGSRPRSPGANLTYELHVLNQDEERYQMVLEPRVLLTELQPDTTYIVRVRMLTPLGPGPFSPDHEFRTSPPVSRGLTGGEIVAVIFGLLLGAALLLGILVFRSRRAQRQRQQRHVTAPPMWIERTSCAEALCGTSRHTRTLHREPWTLPGGWSNFPSRELDPAWLMVDTVIGEGEFGEVYRGTLRLPSQDCKTVAIKTLKDTSPGGQWWNFLREATIMGQFSHPHILHLEGVVTKRKPIMIITEFMENAALDAFLREREDQLVPGQLVAMLQGIASGMNYLSNHNYVHRDLAARNILVNQNLCCKVSDFGLTRLLDDFDGTYETQGGKIPIRWTAPEAIAHRIFTTASDVWSFGIVMWEVLSFGDKPYGEMSNQEVMKSIEDGYRLPPPVDCPAPLYELMKNCWAYDRARRPHFQKLQAHLEQLLANPHSLRTIANFDPRVTLRLPSLSGSDGIPYRTVSEWLESIRMKRYILHFHSAGLDTMECVLELTAEDLTQMGITLPGHQKRILCSIQGFKD

SEQ ID NO: 103 - DNA, 2555 bp, Homo sapiens
  CDS (115)...(2208)
ctctgagcggcacttgcaccgggcagtgccccgctgctgaccaccatgctgatcgcttcttcctctgtgtcggggggcttctgggtagagtttgtcctctcacttctggagaagatgcagacacaggagatcctgaggatactgcgactgcctgagctaggtgacttggaacagtttttccgcagcctctcggccaccaccctcgtgagtatgggtgccctggctgccatccttgcctactggttcactcagcggccaaaggccttgcagccgccatgcaacctcctgatgcagtcagaagaagtagaggacagtggcggggcacggcgatctgtgattgggtctggccctcagctacttacccactactatgatgatgcccggaccatgtaccaggtgttccgccgtgggcttagcatctcagggaatgggccctgtcttggtttcaggaagcctaagcagccttaccagtggctgtcctaccaggaggtggccgacagggctgaatttctggggtccggacttctccagcacaattgtaaagcatgcactgatcagtttattggtgtttttgcacaaaatcggccagagtggatcattgtggagctggcctgctacacatattccatggtggtggtcccgctctatgacaccctgggccctggggctatccgctacatcatcaatacagcggacatcagcaccgtgattgtggacaaacctcagaaggctgtgcttctgctagagcatgtggagaggaaggagactccaggcctcaagctgatcatcctcatggacccattcgaagaagccctgaaagagagagggcagaagtgcggggtggtcattaagtccatgcaggccgtggaggactgtggccaagagaatcaccaggctcctgtgcccccgcagcctgatgacctctccattgtgtgtttcacaagcggcacgacagggaacccaaaaggtgcgatgctcacccatgggaacgtggtggctgatttctcaggctttctgaaagtgacagagagtcagtgggctcccacttgtgcggatgtgcacatttcctatttgcctttagcacacatgtttgagcgaatggtgcagtctgtcgtctattgccacggagggcgtgttggcttcttccagggagatatccgccttctctcagatgacatgaaggctctatgccccaccatcttccctgtggtcccacgactgctgaaccggatgtacgacaagatcttcagccaggcaaacacaccattaaagcgctggctcctggagtttgcagcaaagcgtaagcaagccgaggtccggagtggaatcatcaggaatgatagtatctgggatgaactcttctttaataagattcaggccagtcttggtgggtgtgtgcggatgattgttactggagcagccccagcatcaccaacagttctgggatttctccgggcagctctagggtgccaggtttatgaaggttatggccaaactgagtgcacagctggatgtaccttcaccactcctggcgactggacctcagggcacgtaggggcgccacttccctgcaatcatatcaagctcgttgatgttgaggaactgaactactgggcctgcaaaggagagggagagatatgtgtgagaggaccaaatgtgttcaaaggctacttgaaagatccagacaggacgaaggaggccctggacagcgatggctggcttcacactggagacatcggaaaatggctgccggcaggaactcttaaaattattgatcggaaaaagcatatatttaaacttgctcagggagaatatgttgcacccgagaagattgagaacatctacatccggagccaacctgtggcgcaaatctatgtccatggggacagcttaaaggcctttttggtaggcattgttgtgcctgaccctgaagttatgccctcctgggcccagaagagaggaattgaaggaacatatgcagatctctgcacaaataaggatctgaagaaagccattttggaagatatggtgaggttaggaaaagaaagtggactccattcttttgagcaggttaaagccattcacatccattctgacatgttctcagttcaaaatggcttgctgaccccaacactaaaagctaagagacctgagctgagagagtacttcaaaaaacaaatagaagagctttactcaatccccatgtgaagttcaaggaaagttcttctcagtgtaatgaactgtctagcaatattatagttattcttgaaagtaatgagtcaaaatgacacagctgaaaatgaataagcatctgattttatgactgagccttttcctgtcccaagaggtctttaacaatattttctctatcatcaatgagtatattttatttttattataaaaatgatattgtggtggactgctaaaaatatcacaaatggcaatgtaaaaatcaagacattttctcaagaacttgtaccactaaaagtaatatattgtcaatgttcacagaactattaaactaaaaaaaaaaaaaaaaaaaaaaaaaaaaaaaa

SEQ ID NO: 104 - protein, 697 aa, Homo sapiens
MQTQEILRILRLPELGDLEQFFRSLSATTLVSMGALAAILAYWFTQRPKALQPPCNLLMQSEEVEDSGGARRSVIGSGPQLLTHYYDDARTMYQVFRRGLSISGNGPCLGFRKPKQPYQWLSYQEVADRAEFLGSGLLQHNCKACTDQFIGVFAQNRPEWIIVELACYTYSMVVVPLYDTLGPGAIRYIINTADISTVIVDKPQKAVLLLEHVERKETPGLKLIILMDPFEEALKERGQKCGVVIKSMQAVEDCGQENHQAPVPPQPDDLSIVCFTSGTTGNPKGAMLTHGNVVADFSGFLKVTESQWAPTCADVHISYLPLAHMFERMVQSVVYCHGGRVGFFQGDIRLLSDDMKALCPTIFPVVPRLLNRMYDKIFSQANTPLKRWLLEFAAKRKQAEVRSGIIRNDSIWDELFFNKIQASLGGCVRMIVTGAAPASPTVLGFLRAALGCQVYEGYGQTECTAGCTFTTPGDWTSGHVGAPLPCNHIKLVDVEELNYWACKGEGEICVRGPNVFKGYLKDPDRTKEALDSDGWLHTGDIGKWLPAGTLKIIDRKKHIFKLAQGEYVAPEKIENIYIRSQPVAQIYVHGDSLKAFLVGIVVPDPEVMPSWAQKRGIEGTYADLCTNKDLKKAILEDMVRLGKESGLHSFEQVKAIHIHSDMFSVQNGLLTPTLKAKRPELREYFKKQIEELYSIPM

SEQ ID NO: 105 - DNA, 3255 bp, Homo sapiens
  CDS (10)...(2964)
ggagcgcaaatggcgtccaaccccgaacggggggagattctgctcacggaactgcagggggattcccgaagtcttccgttttctgagaatgtgagtgctgttcaaaaattagacttttcagatacaatggtgcagcagaaattggatgatatcaaggatcgaattaagagagaaataaggaaagaactgaaaatcaaagaaggagctgaaaatctgaggaaagtcacaacagataaaaaaagtttggcttatgtagacaacattttgaaaaaatcaaataaaaaattagaagaactacatcacaagctgcaggaattaaatgcacatattgttgtatcagatccagaagatattacagattgcccaaggactccagatactccaaataatgaccctcgttgttctactagcaacaatagattgaaggccttacaaaaacaattggatatagaacttaaagtaaaacaaggtgcagagaatatgatacagatgtattcaaatggatcttcaaaggatcggaaactccatggtacagctcagcaactgctccaggacagcaagacaaaaatagaagtcatacgaatgcagattcttcaggcagtccagactaatgaattggcttttgataatgcaaaacctgtgataagtcctcttgaacttcggatggaagaattaaggcatcattttaggatagagtttgcagtagcagaaggtgcaaagaatgtaatgaaattacttggctcaggaaaagtaacagacagaaaagcactttcagaagctcaagcaagatttaatgaatcaagtcagaagttggaccttttaaagtattcattagagcaaagattaaacgaagtccccaagaatcatcccaaaagcaggattattattgaagaactttcacttgttgctgcatcaccaacactaagtccacgtcaaagtatgatatctacgcaaaatcaatatagtacactatccaaaccagcagcactaacaggtactttggaagttcgtcttatgggctgccaagatatcctagagaatgtccctggacggtcaaaagcaacatcagttgcactgcctggttggagtccaagtgaaaccagatcatctttcatgagcagaacgagtaaaagtaaaagcggaagtagtcgaaatcttctaaaaaccgatgacttgtccaatgatgtctgtgctgttttgaagctcgataatactgtggttggccaaactagctggaaacccatttccaatcagtcatgggaccagaagtttacactggaactggacaggtcacgtgaactggaaatttcagtttattggcgtgattggcggtctctgtgtgctgtaaaatttctgaggttagaagattttttagacaaccaacggcatggcatgtgtctctatttggaaccacagggtactttatttgcagaggttaccttttttaatccagttattgaaagaagaccaaaacttcaaagacaaaagaaaattttttcaaagcaacaaggcaaaacatttctcagagctcctcaaatgaatattaatattgccacttggggaaggctagtaagaagagctattcctacagtaaatcattctggcaccttcagccctcaagctcctgtgcctactacagtgccagtggttgatgtacgcatccctcaactagcacctccagctagtgattctacagtaaccaaattggactttgatcttgagcctgaacctcctccagccccaccacgagcttcttctcttggagaaatagatgaatcttctgaattaagagttttggatataccaggacaggattcagagactgtttttgatattcagaatgacagaaatagtatacttccaaaatctcaatctgaatacaagcctgatactcctcagtcaggcctagaatatagtggtattcaagaacttgaggacagaagatctcagcaaaggtttcagtttaatctacaagatttcaggtgttgtgctgtcttgggaagaggacattttggaaaggtgcttttagctgaatataaaaacacaaatgagatgtttgctataaaagccttaaagaaaggagatattgtggctcgagatgaagtagacagcctgatgtgtgaaaaaagaatttttgaaactgtgaatagtgtaaggcatccctttttggtgaacctttttgcatgtttccaaaccaaagagcatgtttgctttgtaatggaatatgctgccggtggggacctaatgatgcacattcatactgatgtcttttctgaaccaagagctgtattttatgctgcttgtgtagttcttgggttgcagtatttacatgaacacaaaattgtttatagagatttgaaattggataacttattgctagatacagagggctttgtgaaaattgctgattttggtctttgcaaagaaggaatgggatatggagatagaacaagcacattttgtggcactcctgaatttcttgccccagaagtattaacagaaacttcttatacaagggctgtagattggtggggccttggcgtgcttatatatgaaatgcttgttggtgagtctccctttcctggtgatgatgaagaggaagtttttgacagtattgtaaatgatgaagtaaggtatccaaggttcttatctacagaagccatttctataatgagaaggctgttaagaagaaatcctgaacggcgccttggggctagcgagaaagatgcagaggatgtaaaaaagcacccatttttccggctaattgattggagcgctctgatggacaaaaaagtaaagccaccatttatacctaccataagaggacgagaagatgttagtaattttgatgatgaatttacctcagaagcacctattctgactccacctcgagaaccaaggatactttcggaagaggagcaggaaatgttcagagattttgactacattgctgattggtgttaagttgctagacactgcgaaaccaagctgactcacaagaagacctcttaaaaatagcaacccttcatttgctctctgtgccaccaatagcttctgagttttttgttgttgttgtttttattgaaacacgtgaagatttgtttaaaagtaccattctaatacttcttcaaaagtggctcctcattgtacttcagcgtaaatatgagcactggaaacagtttcatggagtttaagttgagtgaacatcggccatgaaaatccatcacgaatacttttggatcaatagtctatttt

SEQ ID NO: 106 - protein, 984 aa, Homo sapiens
MASNPERGEILLTELQGDSRSLPFSENVSAVQKLDFSDTMVQQKLDDIKDRIKREIRKELKIKEGAENLRKVTTDKKSLAYVDNILKKSNKKLEELHHKLQELNAHIVVSDPEDITDCPRTPDTPNNDPRCSTSNNRLKALQKQLDIELKVKQGAENMIQMYSNGSSKDRKLHGTAQQLLQDSKTKIEVIRMQILQAVQTNELAFDNAKPVISPLELRMEELRHHFRIEFAVAEGAKNVMKLLGSGKVTDRKALSEAQARFNESSQKLDLLKYSLEQRLNEVPKNHPKSRIIIEELSLVAASPTLSPRQSMISTQNQYSTLSKPAALTGTLEVRLMGCQDILENVPGRSKATSVALPGWSPSETRSSFMSRTSKSKSGSSRNLLKTDDLSNDVCAVLKLDNTVVGQTSWKPISNQSWDQKFTLELDRSRELEISVYWRDWRSLCAVKFLRLEDFLDNQRHGMCLYLEPQGTLFAEVTFFNPVIERRPKLQRQKKIFSKQQGKTFLRAPQMNINIATWGRLVRRAIPTVNHSGTFSPQAPVPTTVPVVDVRIPQLAPPASDSTVTKLDFDLEPEPPPAPPRASSLGEIDESSELRVLDIPGQDSETVFDIQNDRNSILPKSQSEYKPDTPQSGLEYSGIQELEDRRSQQRFQFNLQDFRCCAVLGRGHFGKVLLAEYKNTNEMFAIKALKKGDIVARDEVDSLMCEKRIFETVNSVRHPFLVNLFACFQTKEHVCFVMEYAAGGDLMMHIHTDVFSEPRAVFYAACVVLGLQYLHEHKIVYRDLKLDNLLLDTEGFVKIADFGLCKEGMGYGDRTSTFCGTPEFLAPEVLTETSYTRAVDWWGLGVLIYEMLVGESPFPGDDEEEVFDSIVNDEVRYPRFLSTEAISIMRRLLRRNPERRLGASEKDAEDVKKHPFFRLIDWSALMDKKVKPPFIPTIRGREDVSNFDDEFTSEAPILTPPREPRILSEEEQEMFRDFDYIADWC

SEQ ID NO: 107 - DNA, 2088 bp, Homo sapiens
  CDS (186)...(1190)
gaattcggcacgagcgcgcggcgaatctcaacgctgcgccgtctgcgggcgcttccgggccaccagtttctctgctttccaccctggcgccccccagccctggctccccagctgcgctgccccgggcgtccacgccctgcgggcttagcgggttcagtgggctcaatctgcgcagcgccacctccatgttgaccaagcctctacaggggcctcccgcgccccccgggacccccacgccgccgccaggaggcaaggatcgggaagcgttcgaggccgagtatcgactcggccccctcctgggtaaggggggctttggcaccgtcttcgcaggacaccgcctcacagatcgactccaggtggccatcaaagtgattccccggaatcgtgtgctgggctggtcccccttgtcagactcagtcacatgcccactcgaagtcgcactgctatggaaagtgggtgcaggtggtgggcaccctggcgtgatccgcctgcttgactggtttgagacacaggaaggcttcatgctggtcctcgagcggcctttgcccgcccaggatctctttgactatatcacagagaagggcccactgggtgaaggcccaagccgctgcttctttggccaagtagtggcagccatccagcactgccattcccgtggagttgtccatcgtgacatcaaggatgagaacatcctgatagacctacgccgtggctgtgccaaactcattgattttggttctggtgccctgcttcatgatgaaccctacactgactttgatgggacaagggtgtacagccccccagagtggatctctcgacaccagtaccatgcactcccggccactgtctggtcactgggcatcctcctctatgacatggtgtgtggggacattccctttgagagggaccaggagattctggaagctgagctccacttcccagcccatgtctccccagactgctgtgccctaatccgccggtgcctggcccccaaaccttcttcccgaccctcactggaagagatcctgctggacccctggatgcaaacaccagccgaggatgttacccctcaacccctccaaaggaggccctgcccctttggcctggtccttgctaccctaagcctggcctggcctggcctggcccccaatggtcagaagagccatcccatggccatgtcacagggatagatggacatttgttgacttggttttacaggtcattaccagtcattaaagtccagtattactaaggtaagggattgaggatcaggggttagaagacataaaccaagtttgcccagttcccttcccaatcctacaaaggagccttcctcccagaacctgtggtccctgattttggagggggaacttcttgcttctcattttgctaaggaagtttattttggtgaagttgttcccattttgagccccgggactcttattttgatgatgtgtcaccccacattggcacctcctactaccaccacacaaacttagttcatatgcttttacttgggcaagggtgctttccttccaataccccagtagcttttattttagtaaagggaccctttcccctagcctagggtcccatattgggtcaagctgcttacctgcctcagcccaggattttttattttgggggaggtaatgccctgttgttaccccaaggcttctttttttttttttttttttttgggtgaggggaccctactttgttatcccaagtgctcttattctggtgagaagaaccttaattccataatttgggaaggaatggaagatggacaccaccggacaccaccagacaataggatgggatggatggttttttgggggatgggctaggggaaataaggcttgctgtttgttttcctggggcgctccctccaattttgcagatttttgcaacctcctcctgagccgggattgtccaattactaaaatgtaaataatcacgtattgtggggaggggagttccaagtgtgccctccttttttttcctgcctggattatttaaaaagccatgtgtggaaacccactatttaataaaagtaatagaatcagaaaaaaaaaaaaaaaaaaa

SEQ ID NO: 108 - protein, 334 aa, Homo sapiens
MLTKPLQGPPAPPGTPTPPPGGKDREAFEAEYRLGPLLGKGGFGTVFAGHRLTDRLQVAIKVIPRNRVLGWSPLSDSVTCPLEVALLWKVGAGGGHPGVIRLLDWFETQEGFMLVLERPLPAQDLFDYITEKGPLGEGPSRCFFGQVVAAIQHCHSRGVVHRDIKDENILIDLRRGCAKLIDFGSGALLHDEPYTDFDGTRVYSPPEWISRHQYHALPATVWSLGILLYDMVCGDIPFERDQEILEAELHFPAHVSPDCCALIRRCLAPKPSSRPSLEEILLDPWMQTPAEDVTPQPLQRRPCPFGLVLATLSLAWPGLAPNGQKSHPMAMSQG

SEQ ID NO: 109 - DNA, 2838 bp, Homo sapiens
  CDS (462)...(2075)
  misc_feature (1)...(2838): n = A,T,C or G
ggttttccacgttttgcntgaccctgtttgctcaactrwcktytktktykykttytstkttrygcssykwyamrakmymmrmkttkaaaaamcmrraaagttaaytggtaagtttagtctttttgtcttttatttcaaggtcccggatccggtggtggtgcaaatcaaagaactgctcctcagtggatgttgcctttacttctaggcctgtacggaagtgttacttctgctctaaaagctgcggaattctaatacgactcactatagggagtcgacccacgcgtccggtgggcaggccgggggtgagggctcgcgctccgggagctgcacggggctgcgtggaaagagcgccgagcggtggcgtcgttgtcgccccctcctcgtcgggaagaatcgtttggtctcctgccgtgcccggaatcccagtcagaagttccagcctgccactgttctctgatgccatgccagcaccaactcaactgttttttcctctcatccgtaactgtgaactgagcaggatctatggcactgcatgttactgccaccacaaacatctctgttgttcctcatcgtacattcctcagagtcgactgagatacacacctcatccagcatatgctaccttttgcaggccaaaggagaactggtggcagtacacccaaggaaggagatatgcttccacaccacagaaattttacctcacacctccacaagtcaatagcatccttaaagctaatgaatacagtttcaaagtgccagaatttgacggcaaaaatgtcagttctatccttggatttgacagcaatcagctgcctgcaaatgcacccattgaggaccggagaagtgcagcaacctgcttgcagaccagagggatgcttttgggggtttttgatggccatgcaggttgtgcttgttcccaggcagtcagtgaaagactcttttattatattgctgtctctttgttaccccatgagactttgctagagattgaaaatgcagtggagagcggccgggcactgctacccattctccagtggcacaagcaccccaatgattactttagtaaggaggcatccaaattgtactttaacagcttgaggacttactggcaagagcttatagacctcaacactggtgagtcgactgatattgatgttaaggaggctctaattaatgccttcaagaggcttgataatgacatctccttggaggcgcaagttggtgatcctaattcttttctcaactacctggtgcttcgagtggcattttctggagccactgcttgtgtggcccatgtggatggtgttgaccttcatgtggccaatactggcgatagcagagccatgctgggtgtgcaggaagaggacggctcatggtcagcagtcacgctgtctaatgaccacaatgctcaaaatgaaagagaactagaacggctgaaattggaacatccaaagagtgaggccaagagtgtcgtgaaacaggatcggctgcttggcttgctgatgccatttagggcatttggagatgtaaagttcaaatggagcattgaccttcaaaagagagtgatagaatctggcccagaccagttgaatgacaatgaatataccaagtttattcctcctaattatcacacacctccttatctcactgctgagccagaggtaacttaccaccgattaaggccacaggataagtttctggtgttggctactgatgggttgtgggagactatgcataggcaggatgtggttaggattgtgggtgagtacctaactggcatgcatcaccaacagccaatagctgttggtggctacaaggtgactctgggacagatgcatggccttttaacagaaaggagaaccaaaatgtcctcggtatttgaggatcagaacgcagcaacccatctcattcgccacgctgtgggcaacaacgagtttgggactgttgatcatgagcgcctctctaaaatgcttagtcttcctgaagagcttgctcgaatgtacagagatgacattacaatcattgtagttcagttcaattctcatgttgtaggggcgtatcaaaaccaagaatagtgagtggctctttcactggcaattctcaaatgatatacatttaaagggcagattttttaaaaagatactactataataaacatttccagttggtcattctaagcatttacccttttgatactctagctagtcaggtactccaaattgactttgcagcagggtggcagggtcaggagagtctggtcctgcctagctcagatttcatggcacctgcacttgaagcaagtcacttctttatcacaggtgtcttgaaacattagcttcttttaccaacctgagaaaattaggatgacctggcaaataagatcttgaataggccaaaagcaagtatcttgctgtgtgtagtctcttggttaaagtgaagaaacagtactgttcacacctttcttcactgagattccagtgtacatgagaacatatatttattksmwkrwtttyywrrtacacagtctatgcattwttcatawwmawttattttwgcctaaataargtkkttwwcamatcyagtthwtcmatcmatraacrasmamcaascaatctrtatktrtttttktkwktrwttrwytgrmakgmwtsytwaktrrrakramtawmcwcmstyatccayccgmyykmytwmykwaaktrattgaaatattttttwttttgccccccccttggagtcaagaagggtttttagttttatcttctyttctattgaagttaaaaaaaaaaaaaaaaaaaaaaaaaaaaaaaaaaaaaaaaaaaaaaaaaaaagggcgaa

SEQ ID NO: 110 - protein, 537 aa, Homo sapiens
MPAPTQLFFPLIRNCELSRIYGTACYCHHKHLCCSSSYIPQSRLRYTPHPAYATFCRPKENWWQYTQGRRYASTPQKFYLTPPQVNSILKANEYSFKVPEFDGKNVSSILGFDSNQLPANAPIEDRRSAATCLQTRGMLLGVFDGHAGCACSQAVSERLFYYIAVSLLPHETLLEIENAVESGRALLPILQWHKHPNDYFSKEASKLYFNSLRTYWQELIDLNTGESTDIDVKEALINAFKRLDNDISLEAQVGDPNSFLNYLVLRVAFSGATACVAHVDGVDLHVANTGDSRAMLGVQEEDGSWSAVTLSNDHNAQNERELERLKLEHPKSEAKSVVKQDRLLGLLMPFRAFGDVKFKWSIDLQKRVIESGPDQLNDNEYTKFIPPNYHTPPYLTAEPEVTYHRLRPQDKFLVLATDGLWETMHRQDVVRIVGEYLTGMHHQQPIAVGGYKVTLGQMHGLLTERRTKMSSVFEDQNAATHLIRHAVGNNEFGTVDHERLSKMLSLPEELARMYRDDITIIVVQFNSHVVGAYQNQE

SEQ ID NO: 111 - DNA, 4053 bp, Homo sapiens
  CDS (472)...(3549)
gtttatttatggtctgtttctggaatgtccgctcctgggactgggaccatgattttctggcgcagtgcgggtgtctcggcgtccgggatcgggcgggtcgcagtagggctccacatttgttgagtgactgaacaccgttcccggccggggagagcgccgcagccgggtccacttcaggtaggggctgggctttcccggccccgcctaggccccgcccccagcgcgaacccgctcccacctcgcctgtccgcggagcagcagggggtttgactgtgcttttccctcttgcttccctcgctctttctgcagctgccacgaaaacccggaacggcggagcggcgccgcccctcgcggcacctccctggcagcccttggaggccgcgctgggcatgctcagtcagctgggccgcctcagctctcggagtaggaagctcgggcgctccggctgtaaggagccgcggcggggggaaaatggagcccttcaccaatgatcggcttcagctccccaggaatatgattgaaaacagcatgtttgaggaagaaccagatgtggtggatttagccaaagagccttgtttacatcctctagagcctgatgaggtggaatatgagccccggggttcccgactgctggtgcggggtcttggtgagcatgagatggaggaggatgaagaggattatgagtcatcagcaaagctgctgggcatgtccttcatgaatagaagctcaggccttcggaacagtgcaactggttacaggcagagcccagatggggcttgttcagtaccctctgcaaggaccatggtggtctgtgcttttgtcatcgtggttgctgtttctgtaatcatggtgatttacttactgcccagatgtacctttaccaaagaaggctgccataaaaaaaaccagtcaattggactaattcagccatttgcaacaaatgggaaattgtttccatgggcacagatcaggcttcccactgccgtggtgccactacgctatgaactcagcctacacccgaacctaacctcgatgacattcaggggttctgtgacaatttcagttcaggctcttcaggtcacatggaatatcattcttcatagcacaggtcataatatttcaagagtgacctttatgtcagcagtttcaagccaagaaaaacaagctgagatcctggaatatgcatatcatggacagatcgccattgttgcccccgaagcccttctagcagggcacaattatacgttgaagatagagtactcggcaaatatatctagttcttattatgggttttatggcttctcctacacagatgaaagtaatgagaaaaagtactttgcagcaactcagtttgaacccctggcagcaagatctgcttttccttgttttgatgaaccagcatttaaagccacttttatcatcaagatcataagggatgagcaatacaccgctttatcaaatatgcctaagaagtcatcagtcgttctagatgatggacttgttcaggatgagttttctgagagtgtgaagatgagcacttacttggttgctttcattgtgggagagatgaagaacctgagtcaggacgtaaatggaaccctggtttctatatatgctgtaccagaaaagattggtcaagttcattatgccttggaaacaactgtgaagcttcttgagttttttcaaaactactttgaaattcagtacccacttaagaaattggatttggtggctattcctgactttgaagcaggagcaatggaaaattggggtttgctcaccttccgagaggagacacttctgtatgacagtaacacttcttcaatggcggatagaaagctggtgactaaaatcattgctcatgagctggcccaccagtggtttggcaatctggtaacaatgaagtggtggaatgacctatggctaaatgaaggttttgccactttcatggagtatttctctttggaaaaaatattcaaagagctttctagttatgaagatttcttagatgctcgatttaaaaccatgaagaaagattccttaaattcatctcatccaatatcatcatctgttcagtcttcagaacaaattgaagaaatgtttgattctctttcctattttaagggatcttctctcttgttgatgttgaaaacttaccttagtgaagatgtgtttcaacatgctgttgtcctttacctgcataatcacagctatgcatctattcaaagtgatgatctgtgggatagttttaatgaggtcacaaaccaaacactagatgtaaagagaatgatgaaaacctggaccctgcagaaaggatttcctttagtgactgttcaaaagaaaggaaaggaactttttatacaacaagagagattctttttaaatatgaagcctgaaattcagccttcagatacaagctacctgtggcatattccactatcctatgtcactgaaggaagaaattattcaaaatatcaatcggtatcattactggataagaaatcaggtgtcatcaatcttacagaagaagtgctgtgggtcaaagtgaatataaacatgaatggttattatattgtacactatgcagatgatgattgggaagcactaatccatcagttgaaaataaatccttatgttctgagtgacaaagaccgagccaaccttatcaacaacatctttgaacttgcaggcctaggcaaggtacctctcaagagggcctttgatttgattaattatcttggaaatgagaaccatactgcacccatcaccgaagccctgtttcagacagacctcatctataacctccttgaaaaactgggatacatggatctggcctcaagactggtgactagggtatttaaattacttcaaaaccaaattcaacaacaaacttggactgatgagggcactccatctatgcgagagcttcggtcagccctgctagagtttgcttgcacccacaacctggggaactgctctactactgccatgaaactgtttgatgactggatggcatccaatggaactcaaagcctacctactgatgtcatgacaactgtgttcaaagttggagcaaaaactgacaaaggctggtcattccttttgggcaaatacatttctataggctctgaagcagagaagaaccaaatactagaagcacttgccagctcagaggatgtgcggaagctttactggttaatgaaaagtagcctgaatggagataacttccgaacacagaagctgtcttttatcattagaacagtgggtcgacattttcctggacacttactggcatgggatttggtcaaagagaactggaataagcttgtacagaagttccctctggggtcctataccatacaaaatattgttgctggatcaacttacctgttttcaacaaagacacatttatctgaggttcaggcattctttgaaaatcagtcagaggcaaccttccggcttcgttgtgtccaggaggctttggaagtcattcagttgaatatccagtggatggagaagaacctcaaaagtctcacatggtggctgtagcatgcacaaccgcacctcattttgttgcccattcagagagcttgtaagcttgggctctgccgcttttgcaaaagccaaggtaaagccaggatcgctgccaagttgtttgcactctttggagttctagttagctcagggcctgactgtatttttcatccatcttttctgaagtgtctttgggcagtatgtagttatttattacaaaattatattcacctaaatgccaaccatctacaaaaacaatgagtaatttttctactttgaagatacacagatggggacccaaaaccctgttttggaattctgttctattcctcagtatccagaaagttactgacacagtaaaacaaggaaagttctaccctaagagccgccatcacttcaggccgctggtttgtcagccatctgttgcttcttattgatagatggcattggaatgtggtacaaagttagctctgaagaatatggtaacgaagacaataaagcatgcactgtaagaactga

SEQ ID NO: 112 - protein, 1025 aa, Homo sapiens
MEPFTNDRLQLPRNMIENSMFEEEPDVVDLAKEPCLHPLEPDEVEYEPRGSRLLVRGLGEHEMEEDEEDYESSAKLLGMSFMNRSSGLRNSATGYRQSPDGACSVPSARTMVVCAFVIVVAVSVIMVIYLLPRCTFTKEGCHKKNQSIGLIQPFATNGKLFPWAQIRLPTAVVPLRYELSLHPNLTSMTFRGSVTISVQALQVTWNIILHSTGHNISRVTFMSAVSSQEKQAEILEYAYHGQIAIVAPEALLAGHNYTLKIEYSANISSSYYGFYGFSYTDESNEKKYFAATQFEPLAARSAFPCFDEPAFKATFIIKIIRDEQYTALSNMPKKSSVVLDDGLVQDEFSESVKMSTYLVAFIVGEMKNLSQDVNGTLVSIYAVPEKIGQVHYALETTVKLLEFFQNYFEIQYPLKKLDLVAIPDFEAGAMENWGLLTFREETLLYDSNTSSMADRKLVTKIIAHELAHQWFGNLVTMKWWNDLWLNEGFATFMEYFSLEKIFKELSSYEDFLDARFKTMKKDSLNSSHPISSSVQSSEQIEEMFDSLSYFKGSSLLLMLKTYLSEDVFQHAVVLYLHNHSYASIQSDDLWDSFNEVTNQTLDVKRMMKTWTLQKGFPLVTVQKKGKELFIQQERFFLNMKPEIQPSDTSYLWHIPLSYVTEGRNYSKYQSVSLLDKKSGVINLTEEVLWVKVNINMNGYYIVHYADDDWEALIHQLKINPYVLSDKDRANLINNIFELAGLGKVPLKRAFDLINYLGNENHTAPITEALFQTDLIYNLLEKLGYMDLASRLVTRVFKLLQNQIQQQTWTDEGTPSMRELRSALLEFACTHNLGNCSTTAMKLFDDWMASNGTQSLPTDVMTTVFKVGAKTDKGWSFLLGKYISIGSEAEKNQILEALASSEDVRKLYWLMKSSLNGDNFRTQKLSFIIRTVGRHFPGHLLAWDLVKENWNKLVQKFPLGSYTIQNIVAGSTYLFSTKTHLSEVQAFFENQSEATFRLRCVQEALEVIQLNIQWMEKNLKSLTWWL

SEQ ID NO: 113 - DNA, 1537 bp, Homo sapiens
  CDS (446)...(1423)
ggcacgagggttctccaaacccgcgctgcggagtgagtgaccaagttccggccagttcgacctcgaggatccagaggtggagacggtactacctcccagctctgttttccatccccttcaggtccttcctcgggaggcggcgaaggcggtccaccctgcgcgtgatccttcatgcccggcccctgcccctccctccgggtggaacttccccctcaccgccagacttaagctgaggatcgttggatctctggcggggtgcagaactgagcccaggccacagtaccctattcacgctctgtgcttgtgccaaggtttcaagtgatcctcccgcctcagcctgcccaggtgctgagattacatgtatgagccactgcacctggaaaggagccagaaatgtgaagtgctagctgaaggatgagcagcagctagccaggcaaagggggcaatggcggcttcctgtgttctactgcacactgggcagaagatgcctctgattggtctgggtacctggaagagtgagcctggtcaggtaaaagcagctgttaagtatgcccttagcgtaggctaccgccacattgattgtgctgctatctacggcaatgagcctgagattggggaggccctgaaggaggacgtgggaccaggcaaggcggtgcctcgggaggagctgtttgtgacatccaagctgtggaacaccaagcaccaccccgaggatgtggagcctgccctccggaagactctggctgacctccagctggagtatctggacctgtacctgatgcactggccttatgcctttgagcggggagacaaccccttccccaagaatgctgatgggactatatgctacgactccacccactacaaggagacttggaaggctctggaggcactggtggctaaggggctggtgcaggcgctgggcctgtccaacttcaacagtcggcagattgatgacatactcagtgtggcctccgtgcgtccagctgtcttgcaggtggaatgccacccatacttggctcaaaatgagctaattgcccactgccaagcacgtggcctggaggtaactgcttatagccctttgggctcctctgatcgtgcatggcgtgatcctgatgagcctgtcctgctggaggaaccagtagtcctggcattggctgaaaagtatggccgatctccagctcagatcttgctcaggtggcaggtccagcggaaagtgatctgcatccccaaaagtatcactccttctcgaatccttcagaacatcaaggtgtttgacttcacctttagcccagaagagatgaagcagctaaatgccctgaacaaaaattggagatatattgtgcctatgcttacggtggatgggaagagagtcccaagggatgcagggcatcctctgtacccctttaatgacccgtactgagaccacagcttcttggcctcccttccagctctgcagctaatgaggtcctgccacaacggaaagagggagttaataaagtcattggagcatccaaaaaaaaaaaaaaaaaaaaaa

SEQ ID NO: 114 - protein, 325 aa, Homo sapiens
MAASCVLLHTGQKMPLIGLGTWKSEPGQVKAAVKYALSVGYRHIDCAAIYGNEPEIGEALKEDVGPGKAVPREELFVTSKLWNTKHHPEDVEPALRKTLADLQLEYLDLYLMHWPYAFERGDNPFPKNADGTICYDSTHYKETWKALEALVAKGLVQALGLSNFNSRQIDDILSVASVRPAVLQVECHPYLAQNELIAHCQARGLEVTAYSPLGSSDRAWRDPDEPVLLEEPVVLALAEKYGRSPAQILLRWQVQRKVICIPKSITPSRILQNIKVFDFTFSPEEMKQLNALNKNWRYIVPMLTVDGKRVPRDAGHPLYPFNDPY

SEQ ID NO: 115 - DNA, 2443 bp, Homo sapiens
  CDS (89)...(1948)
cccccccccgccgctgccgcctctgcctgggtcccttcggccgtacctctgcgtgggggctgcctccccggctcccggtgcagacaccatgtacggatttgtgaatcacgccctggagttgctggtgatccgcaattacggccccgaggtgtgggaagacatcaaaaaagaggcacagttagatgaagaaggacagtttcttgtcagaataatatatgatgactccaaaacttatgatttggttgctgctgcaagcaaagtcctcaatctcaatgctggagaaatcctccaaatgtttgggaagatgtttttcgtcttttgccaagaatctggttatgatacaatcttgcgtgtcctgggctctaatgtcagagaatttctacagaaccttgatgctctgcacgaccaccttgctaccatctacccaggaatgcgtgcaccttcctttaggtgcactgatgcagaaaagggcaaaggactcattttgcactactactcagagagagaaggacttcaggatattgtcattggaatcatcaaaacagtggcacaacaaatccatggcactgaaatagacatgaaggttattcagcaaagaaatgaagaatgtgatcatactcaatttttaattgaagaaaaagagtcaaaagaagaggatttttatgaagatcttgacagatttgaagaaaatggtacccaggaatcacgcatcagcccatatacattctgcaaagcttttccttttcatataatatttgaccgggacctagtggtcactcagtgtggcaatgctatatacagagttctcccccagctccagcctgggaattgcagccttctgtctgtcttctcgctggttcgtcctcatattgatattagtttccatgggatcctttctcacatcaatactgtttttgtattgagaagcaaggaaggattgttggatgtggagaaattagaatgtgaggatgaactgactgggactgagatcagctgcttacgtctcaagggtcaaatgatctacttacctgaagcagatagcatactttttctatgttcaccaagtgtcatgaacctggacgatttgacaaggagagggctgtatctaagtgacatccctctgcatgatgccacgcgcgatcttgttcttttgggagaacaatttagagaggaatacaaactcacccaagaactggaaatcctcactgacaggctacagctcacgttaagagccctggaagatgaaaagaaaaagacagacacattgctgtattctgtccttcctccgtctgttgccaatgagctgcggcacaagcgtccagtgcctgccaaaagatatgacaatgtgaccatcctctttagtggcattgtgggcttcaatgctttctgtagcaagcatgcatctggagaaggagccatgaagatcgtcaacctcctcaacgacctctacaccagatttgacacactgactgattcccggaaaaacccatttgtttataaggtggagactgttggtgacaagtatatgacagtgagtggtttaccagagccatgcattcaccatgcacgatccatctgccacctggccttggacatgatggaaattgctggccaggttcaagtagatggtgaatctgttcagataacaatagggatacacactggagaggtagttacaggtgtcataggacagcggatgcctcgatactgtctttttgggaatactgtcaacctcacaagccgaacagaaaccacaggagaaaagggaaaaataaatgtgtctgaatatacatacagatgtcttatgtctccagaaaattcagatccacaattccacttggagcacagaggcccagtgtccatgaagggcaaaaaagaaccaatgcaagtttggtttctatccagaaaaaatacaggaacagaggaaacaaagcaggatgatgactgaatcttggattatggggtgaagaggagtacagactaggttccagttttctcctaacacgtgccaagcccaggagcagttcttccctatggatacagattttcttttgtccttgtccattaccccaagactttcttctagatatatctctcactatccgttattcaaccttagctctgctttctattactttttaggctttagtatattatctaaagtttggcttttgatgtggatgatgtgagcttcatgtgtcttaaaatctactacaagcattacctaacatggtgatctgcaagtagtaggcacccaataaatatttgttgaatttagttaaatgaaactgaacagtgtttggccatgtgtatatttatatcatgtttaccaaatctgtttagtgttccacatatatgtatatgtatattttaatgactataatgtaataaagtttatatcatgttggtgtatatcattatagaaatcattttctaaaggagt

SEQ ID NO: 116 - protein, 619 aa, Homo sapiens
MYGFVNHALELLVIRNYGPEVWEDIKKEAQLDEEGQFLVRIIYDDSKTYDLVAAASKVLNLNAGEILQMFGKMFFVFCQESGYDTILRVLGSNVREFLQNLDALHDHLATIYPGMRAPSFRCTDAEKGKGLILHYYSEREGLQDIVIGIIKTVAQQIHGTEIDMKVIQQRNEECDHTQFLIEEKESKEEDFYEDLDRFEENGTQESRISPYTFCKAFPFHIIFDRDLVVTQCGNAIYRVLPQLQPGNCSLLSVFSLVRPHIDISFHGILSHINTVFVLRSKEGLLDVEKLECEDELTGTEISCLRLKGQMIYLPEADSILFLCSPSVMNLDDLTRRGLYLSDIPLHDATRDLVLLGEQFREEYKLTQELEILTDRLQLTLRALEDEKKKTDTLLYSVLPPSVANELRHKRPVPAKRYDNVTILFSGIVGFNAFCSKHASGEGAMKIVNLLNDLYTRFDTLTDSRKNPFVYKVETVGDKYMTVSGLPEPCIHHARSICHLALDMMEIAGQVQVDGESVQITIGIHTGEVVTGVIGQRMPRYCLFGNTVNLTSRTETTGEKGKINVSEYTYRCLMSPENSDPQFHLEHRGPVSMKGKKEPMQVWFLSRKNTGTEETKQDDD

SEQ ID NO: 117 - DNA, 2749 bp, Homo sapiens
  CDS (281)...(2134)
  misc_feature (1)...(2749): n = A,T,C or G
gcttggtgctgcatctcaatccctgtggccccaggagcagctgcggcaggaacatgtatggatttatcaacacctgtctgcaatctcttgtgatagagaaatttggtgaagaaacatgggaaaaattgaaaacttctgcagaagtacaagatgccttcatgacctacacaatgtatgatgacgtcatcaccattaagctcatccaagaggcctgcaacattctgggtgtctccatggaagccatcctgaaactctttggagaatactttcaattctgaagatgtctggctatgacaggatgctacggacactgggaggaaatctcatggagtttattgaaaacctggatgccctccacagttacctggcactctcttatcaggagatgaatgcaccatcgtttcgtgtggagagaggagcagatgggaaaatgtttctccattactactcggatagaagtggtctgtgccacattgtaccaggtatcattgaggctgtggccaaagacttctttgatattgatgtaatcatggacattcttgacatgaatgaagaagtggagaggacagggaagaaggagcatgttgtgtttctgattgtacagaaggctcacaggaagatgagaaagacnaagccaaaaaggttacaagacagtcagggcatggagagagaccaagaggccctccaggcagctttcctcaagatgaaggagaaatatttgaatgtctctgcttgtcctgtgaaaaaatcccactgggatgttgtgagaagcatagtcatgtttggaaaagggcatctcatgaacacctttgagccaatttatcctgagagactctggattgaagagaagacattctgcaacgcttttcctttccacattgtattcgatgaatcactacaggtgaagcaagccagagtgaacattcagaagtacgtaccaggactccaaacccagaatattcaactggatgagtatttctccatcattcatcctcaagttaccttcaacattttcagcatccgcagatttatcaacagtcaatttgtcctgaagacacgaagagaaatgatgcctgtagcatggcaaagtcggactacactcaaacttcaaggccagatgatctggatggagtccatgtggtgcatggtgtacctgtgctctccgaagctccgcagcctgcaagagctggaagaactcaatatgcatctttctgacatcgcccccaacgacaccaccagggatctcatcctcctgaaccagcagcggctggctgagatagagctgtccaaccagctggaaaggaagaaggaggagctacaggtcctctccaagcacttggccattgaaaagaagaaaacagagaccttactttatgccatgctgcccaaacacgtggccaaccagctgagggagggcaaaaaggtggctgcaggagaatttaaaagctgcacgattcttttcagcgatgtagtgacatttactaacatctgtactgcctgtgaacctatacaaatagtgaacgtgctgaattccatgtactccaagtttgacagattaaccagtgtgcacgcagtctataaagtagaaacaataggagatgcttatatggtggtaggaggtgtaccagtgcctattggaaaccatgctcaaagagtggctaattttgccttggggatgagaatttctgcaaaggaagtgacgaatcctgttactggagaacccatccagctcagagtggggatccatactggaccagtcttagcagatgttgtaggagacaagatgccacggtactgcttgtttggtgacactgtgaacacagcttctaggatggaaagtcatgggcttcccaacaaagtgcacctcagtcccacagcctacagagccttgaaaaatcaagggtttaaaatcattgagaggggtgaaattgaagtgaaaggtaaagggagaatgaccacatactttttgatccagaacttgaatgccacagaggatgagatcatggggagatctaaaaccccagttgatcacaaggggtcaacacagaaagcatccttgcccaccaccaagctccagggctcagttcaaccatcttgccctgaacactcttctcttgcatcctggttattatgacgttctttgagctgggccgatagatccagctgaagagttctacatacattagtcttcaaggttcttctctgggcgtttcccatgcagctctctggtagctggggaatgatttgtaatgagtacatgaaacacgttaaatgtccttcagcctccctaccacgacatccaacagctggaacttccatccagtccttcacatgatgggcacctgtgggaaacctgccaggggcagccgatgttcagaggcatccaaaaaaagtctcccacttcggcagccatgaagcccactcatgcaaccgtcctcacttttccttcctctcacggttttttgcagaagcaagtgctcagggaaatgaagacaggagaactgctgccgtcatgagctatgccgacagtcagcagctgatccccgacagaaacgcagcagatgcagacgctcctgatgaaatcatccctgtggggagtgcagggccagatggggactccatggagacagccgaccggcgacagccttcagctccgacaaagacacatcaccttgcaaatgacactttgccgtctggtttctgtgttttgttgtaacaggttaaatgaacccctgggcttaattttccc

SEQ ID NO: 118 - protein, 617 aa, Homo sapiens
MSGYDRMLRTLGGNLMEFIENLDALHSYLALSYQEMNAPSFRVERGADGKMFLHYYSDRSGLCHIVPGIIEAVAKDFFDIDVIMDILDMNEEVERTGKKEHVVFLIVQKAHRKMRKTKPKRLQDSQGMERDQEALQAAFLKMKEKYLNVSACPVKKSHWDVVRSIVMFGKGHLMNTFEPIYPERLWIEEKTFCNAFPFHIVFDESLQVKQARVNIQKYVPGLQTQNIQLDEYFSIIHPQVTFNIFSIRRFINSQFVLKTRREMMPVAWQSRTTLKLQGQMIWMESMWCMVYLCSPKLRSLQELEELNMHLSDIAPNDTTRDLILLNQQRLAEIELSNQLERKKEELQVLSKHLAIEKKKTETLLYAMLPKHVANQLREGKKVAAGEFKSCTILFSDVVTFTNICTACEPIQIVNVLNSMYSKFDRLTSVHAVYKVETIGDAYMVVGGVPVPIGNHAQRVANFALGMRISAKEVTNPVTGEPIQLRVGIHTGPVLADVVGDKMPRYCLFGDTVNTASRMESHGLPNKVHLSPTAYRALKNQGFKIIERGEIEVKGKGRMTTYFLIQNLNATEDEIMGRSKTPVDHKGSTQKASLPTTKLQGSVQPSCPEHSSLASWLL

SEQ ID NO: 119 - DNA, 1154 bp, Homo sapiens
  CDS (22)...(870)
cggacgcgtgggtccgtgaccatgaaggtcaaggtcatccccgtgctcgaggacaactacatgtacctggtcatcgaggagctcacgcgcgaggcggtggccgtggacgtggctgtgcccaagaggctgctggagatcgtgggccgggagggggtgtctctgaccgctgtgctgaccacccaccatcactgggaccacgcgcggggaaacccggagctggcgcggcttcgtcccgggctggcggtgctgggcgcggacgagcgcatcttctcgctgacgcgcaggctggcgcacggcgaggagctgcggttcggggccatccacgtgcgttgcctcctgacgcccggccacaccgccggccacatgagctacttcctgtgggaggacgattgcccggacccacccgccctgttctcgggcgacgcgctgtcggtggccggctgcggctcgtgcctggagggcagcgcccagcagatgtaccagagcctggccgagctgggtaccctgccccccgagacgaaggtgttctgcggccacgagcacacgcttagcaacctggagtttgcccagaaagtggagccctgcaacgaccacgtgagagccaagctgtcctgggctaagaagagggatgaggatgacgtgcccactgtgccgtcgactctgggcgaggagcgcctctacaaccccttcctgcgggtggcagaggagccggtgcgcaagttcacgggcaaggcggtccccgccgacgtcctggaggcgctatgcaaggagcgggcgcgcttcgaacaggcgggcgagccgcggcagccacaggcgcgggccctccttgcgctgcagtgggggctcctgagtgcagccccacacgactgagccacccagaccctcacagggctggggcctgcgtccctcctcgtgacctcggccagctggacccacatgagggccacctctggaaccttcttcgaggccctggccagccatctgcccagcctcggagggtgggcaacctggtgcttcccgggtggacacacaggaccactcagtggggcctgtgtgggcgccgagacctgggtgtctgggaagtggggcacacggggcctccgaactatgaataaagctttgaaagccgttgtcaaaaaaaaaaaaaaaaaaaa

SEQ ID NO: 120 - protein, 282 aa, Homo sapiens
MKVKVIPVLEDNYMYLVIEELTREAVAVDVAVPKRLLEIVGREGVSLTAVLTTHHHWDHARGNPELARLRPGLAVLGADERIFSLTRRLAHGEELRFGAIHVRCLLTPGHTAGHMSYFLWEDDCPDPPALFSGDALSVAGCGSCLEGSAQQMYQSLAELGTLPPETKVFCGHEHTLSNLEFAQKVEPCNDHVRAKLSWAKKRDEDDVPTVPSTLGEERLYNPFLRVAEEPVRKFTGKAVPADVLEALCKERARFEQAGEPRQPQARALLALQWGLLSAAPHD

SEQ ID NO: 121 - DNA, 1680 bp, Homo sapiens
  CDS (101)...(1024)
ggcacgaggacggcgggtcgccagcgcctcagtagctcgcgcggtgcctgtcggtagtcgcgtgcggggcggcggggcggcggggcggccggcggcggccatgggagatatcccagccgtgggcctcagctcctggaaggcttctccagggaaagtgaccgaggcagtgaaagaggccattgacgcagggtaccggcacttcgactgtgcttacttttaccacaatgagagggaggttggagcagggatccgttgcaagatcaaggaaggcgctgtaagacgggaggatctgttcattgccactaagctgtggtgcacctgccataagaagtccttggtggaaacagcatgcagaaagagtctcaaggccttgaagctgaactatttggacctctacctcatacactggcccatgggtttcaagcctcctcatccagaatggatcatgagctgcagtgaactttccttctgcctctcacatcctcgagtgcaggacttgcctctggacgagagcaacatggttattcccagtgacacggacttcctggacacgtgggaggccatggaggacctggtgatcaccgggctggtgaagaacatcggggtgtcaaacttcaaccatgaacagcttgagaggcttttgaataagcctgggttgaggttcaagccactaaccaaccagattgagtgccacccatatcttactcagaagaatctgatcagtttttgccaatccagagatgtgtccgtgactgcttaccgtcctcttggtggctcgtgtgagggggttgacctgatagacaaccctgtgatcaagaggattgcaaaggagcacggcaagtctcctgctcagattttgatccgatttcaaatccagaggaatgtgatagtgatccccggatctatcaccccaagtcacattaaagagaatatccaggtgtttgattttgaattaacacagcacgatatggataacatcctcagcctaaacaggaatctccgactggccatgttccccatgtaaatatggctccttctttttaaaacagagggaagaatatacagattgaatgattggtgtctgaatagaactaaaaatcacaaagactatcctttccacatagaatactgaggacgcttccccttccttgtttctgctcagcccagatgcacagacactattggcaatgttgaccctcctctgtcatcacagcgccagggcagctgtgcctgggacaggagccacacagtcagagggggatgtaagagccaccttctctgacaaatctggagaattgagtgtgttctaagtgaaggcaatggggtttctccaagacagcctgtgtggcctctactctgaacaaatacactgatgagtcatcagtgaaatttgccttcacattttaagaaaactttatcttatggagttatttaagccatctacagagctgaggaaacagtgtaatgtgtctctgccccattgcgcagctccacccattgtgccccaggccagcccgcgtcacctacacttccttctgtgccctgccagtgacccccaggttattctaaagcagagtccttcccttcccccagtgagaaggaaaatgggataagtctgggacactgtttcagttcaataaagaggcttttttcttccttaaaaaaaaaaaaaaaaaaaaa

SEQ ID NO: 122 - protein, 307 aa, Homo sapiens
MGDIPAVGLSSWKASPGKVTEAVKEAIDAGYRHFDCAYFYHNEREVGAGIRCKIKEGAVRREDLFIATKLWCTCHKKSLVETACRKSLKALKLNYLDLYLIHWPMGFKPPHPEWIMSCSELSFCLSHPRVQDLPLDESNMVIPSDTDFLDTWEAMEDLVITGLVKNIGVSNFNHEQLERLLNKPGLRFKPLTNQIECHPYLTQKNLISFCQSRDVSVTAYRPLGGSCEGVDLIDNPVIKRIAKEHGKSPAQILIRFQIQRNVIVIPGSITPSHIKENIQVFDFELTQHDMDNILSLNRNLRLAMFPM

What is claimed:

1. A method for identifying a compound capable of treating a tumorigenic disorder or angiogenic disorder, comprising assaying the ability of the compound to modulate 140, 1470, 1686, 2089, 2427, 3702, 5891, 6428, 7181, 7660, 25641, 69583, 49863, 8897, 1682, 17667, 9235, 3703, 14171, 10359, 1660, 1450, 18894, 2088, 32427, 2160, 9252, 9389, 1642, 85269, 10297, 1584, 9525, 14124, 4469, 8990, 2100, 9288, 64698, 10480, 20893, 33230, 1586, 9943, 16334, 68862, 9011, 14031, 6178, 21225, 1420, 32236, 2099, 2150, 26583, 2784, 8941, 9811, 27444, 50566 or 66428 nucleic acid expression or 140, 1470, 1686, 2089, 2427, 3702, 5891, 6428, 7181, 7660, 25641, 69583, 49863, 8897, 1682, 17667, 9235, 3703, 14171, 10359, 1660, 1450, 18894, 2088, 32427, 2160, 9252, 9389, 1642, 85269, 10297, 1584, 9525, 14124, 4469, 8990, 2100, 9288, 64698, 10480, 20893, 33230, 1586, 9943, 16334, 68862, 9011, 14031, 6178, 21225, 1420, 32236, 2099, 2150, 26583, 2784, 8941, 9811, 27444, 50566 or 66428 polypeptide activity, thereby identifying a compound capable of treating a tumorigenic disorder or an angiogenic disorder.

2. A method for identifying a compound capable of modulating tumorigenesis or angiogenesis comprising:
a) contacting a cell which expresses 140, 1470, 1686, 2089, 2427, 3702, 5891, 6428, 7181, 7660, 25641, 69583, 49863, 8897, 1682, 17667, 9235, 3703, 14171, 10359, 1660, 1450, 18894, 2088, 32427, 2160, 9252, 9389, 1642, 85269, 10297, 1584, 9525, 14124, 4469, 8990, 2100, 9288, 64698, 10480, 20893, 33230, 1586, 9943, 16334, 68862, 9011, 14031, 6178, 21225, 1420, 32236, 2099, 2150, 26583, 2784, 8941, 9811, 27444, 50566 or 66428 with a test compound; and
b) assaying the ability of the test compound to modulate the expression of a 140, 1470, 1686, 2089, 2427, 3702, 5891, 6428, 7181, 7660, 25641, 69583, 49863, 8897, 1682, 17667, 9235, 3703, 14171, 10359, 1660, 1450, 18894, 2088, 32427, 2160, 9252, 9389, 1642, 85269, 10297, 1584, 9525, 14124, 4469, 8990, 2100, 9288, 64698, 10480, 20893, 33230, 1586, 9943, 16334, 68862, 9011, 14031, 6178, 21225, 1420, 32236, 2099, 2150, 26583, 2784, 8941, 9811, 27444, 50566 or 66428 nucleic acid or the activity of a 140, 1470, 1686, 2089, 2427, 3702, 5891, 6428, 7181, 7660, 25641, 69583, 49863, 8897, 1682, 17667, 9235, 3703, 14171, 10359, 1660, 1450, 18894, 2088, 32427, 2160, 9252, 9389, 1642, 85269, 10297, 1584, 9525, 14124, 4469, 8990, 2100, 9288, 64698, 10480, 20893, 33230, 1586, 9943, 16334, 68862, 9011, 14031, 6178, 21225, 1420, 32236, 2099, 2150, 26583, 2784, 8941, 9811, 27444, 50566 or 66428 polypeptide, thereby identifying a compound capable of modulating a tumorigenesis or angiogenesis.

3. A method for modulating tumorigenesis or angiogenesis in a cell comprising contacting a cell with a 140, 1470, 1686, 2089, 2427, 3702, 5891, 6428, 7181, 7660, 25641, 69583, 49863, 8897, 1682, 17667, 9235, 3703, 14171, 10359, 1660, 1450, 18894, 2088, 32427, 2160, 9252, 9389, 1642, 85269, 10297, 1584, 9525, 14124, 4469, 8990, 2100, 9288, 64698, 10480, 20893, 33230, 1586, 9943, 16334, 68862, 9011, 14031, 6178, 21225, 1420, 32236, 2099, 2150, 26583, 2784, 8941, 9811, 27444, 50566 or 66428 modulator, thereby modulating tumorigenesis or angiogenesis in the cell.

4. The method of claim 2, wherein the cell is selected from a group consisting of an endothelial cell, a stromal cell, an epithelial cell, an angiogenic-tissue derived cell, and a fetal derived cell.

5. The method of claim 3, wherein the 140, 1470, 1686, 2089, 2427, 3702, 5891, 6428, 7181, 7660, 25641, 69583, 49863, 8897, 1682, 17667, 9235, 3703, 14171, 10359, 1660, 1450, 18894, 2088, 32427, 2160, 9252, 9389, 1642, 85269, 10297, 1584, 9525, 14124, 4469, 8990, 2100, 9288, 64698, 10480, 20893, 33230, 1586, 9943, 16334, 68862, 9011, 14031, 6178, 21225, 1420, 32236, 2099, 2150, 26583, 2784, 8941, 9811, 27444, 50566 or 66428 modulator is a small organic molecule, peptide, antibody or antisense nucleic acid molecule.

6. The method of claim 3, wherein the 140, 1470, 1686, 2089, 2427, 3702, 5891, 6428, 7181, 7660, 25641, 69583, 49863, 8897, 1682, 17667, 9235, 3703, 14171, 10359, 1660, 1450, 18894, 2088, 32427, 2160, 9252, 9389, 1642, 85269, 10297, 1584, 9525, 14124, 4469, 8990, 2100, 9288, 64698, 10480, 20893, 33230, 1586, 9943, 16334, 68862, 9011, 14031, 6178, 21225, 1420, 32236, 2099, 2150, 26583, 2784, 8941, 9811, 27444, 50566 or 66428 modulator is capable of modulating 140, 1470, 1686, 2089, 2427, 3702, 5891, 6428, 7181, 7660, 25641, 69583, 49863, 8897, 1682, 17667, 9235, 3703, 14171, 10359, 1660, 1450, 18894, 2088, 32427, 2160, 9252, 9389, 1642, 85269, 10297, 1584, 9525, 14124, 4469, 8990, 2100, 9288, 64698, 10480, 20893, 33230, 1586, 9943, 16334, 68862, 9011, 14031, 6178, 21225, 1420, 32236, 2099, 2150, 26583, 2784, 8941, 9811, 27444, 50566 or 66428 polypeptide activity.

7. The method of claim 6, wherein the 140, 1470, 1686, 2089, 2427, 3702, 5891, 6428, 7181, 7660, 25641, 69583, 49863, 8897, 1682, 17667, 9235, 3703, 14171, 10359, 1660, 1450, 18894, 2088, 32427, 2160, 9252, 9389, 1642, 85269, 10297, 1584, 9525, 14124, 4469, 8990, 2100, 9288, 64698, 10480, 20893, 33230, 1586, 9943, 16334, 68862, 9011, 14031, 6178, 21225, 1420, 32236, 2099, 2150, 26583, 2784, 8941, 9811, 27444, 50566 or 66428 modulator is a small organic molecule, peptide, antibody or antisense nucleic acid molecule.

8. The method of claim 6, wherein the 140, 1470, 1686, 2089, 2427, 3702, 5891, 6428, 7181, 7660, 25641, 69583, 49863, 8897, 1682, 17667, 9235, 3703, 14171, 10359, 1660, 1450, 18894, 2088, 32427, 2160, 9252, 9389, 1642, 85269, 10297, 1584, 9525, 14124, 4469, 8990, 2100, 9288, 64698, 10480, 20893, 33230, 1586, 9943, 16334, 68862, 9011, 14031, 6178, 21225, 1420, 32236, 2099, 2150, 26583, 2784, 8941, 9811, 27444, 50566 or 66428 modulator is capable of modulating 140, 1470, 1686, 2089, 2427, 3702, 5891, 6428, 7181, 7660, 25641, 69583, 49863, 8897, 1682, 17667, 9235, 3703, 14171, 10359, 1660, 1450, 18894, 2088, 32427, 2160, 9252, 9389, 1642, 85269, 10297, 1584, 9525, 14124, 4469, 8990, 2100, 9288, 64698, 10480, 20893, 33230, 1586, 9943, 16334, 68862, 9011, 14031, 6178, 21225, 1420, 32236, 2099, 2150, 26583, 2784, 8941, 9811, 27444, 50566 or 66428 nucleic acid expression.

9. A method for treating a subject having a tumorigenic disorder or angiogenic disorder characterized by aberrant 140, 1470, 1686, 2089, 2427, 3702, 5891, 6428, 7181, 7660, 25641, 69583, 49863, 8897, 1682, 17667, 9235, 3703, 14171, 10359, 1660, 1450, 18894, 2088, 32427, 2160, 9252, 9389, 1642, 85269, 10297, 1584, 9525, 14124, 4469, 8990, 2100, 9288, 64698, 10480, 20893, 33230, 1586, 9943, 16334, 68862, 9011, 14031, 6178, 21225, 1420, 32236, 2099, 2150, 26583, 2784, 8941, 9811, 27444, 50566 or 66428 polypeptide activity or aberrant 140, 1470, 1686, 2089, 2427, 3702, 5891, 6428, 7181, 7660, 25641, 69583, 49863, 8897, 1682, 17667, 9235, 3703, 14171, 10359, 1660, 1450, 18894, 2088, 32427, 2160, 9252, 9389, 1642, 85269, 10297, 1584, 9525, 14124, 4469, 8990, 2100, 9288, 64698, 10480, 20893, 33230, 1586, 9943, 16334, 68862, 9011, 14031, 6178, 21225, 1420, 32236, 2099, 2150, 26583, 2784, 8941, 9811, 27444, 50566 or 66428 nucleic acid expression comprising administering to the subject a 140, 1470, 1686, 2089, 2427, 3702, 5891, 6428, 7181, 7660, 25641, 69583, 49863, 8897, 1682, 17667, 9235, 3703, 14171, 10359, 1660, 1450, 18894, 2088, 32427, 2160, 9252, 9389, 1642, 85269, 10297, 1584, 9525, 14124, 4469, 8990, 2100, 9288, 64698, 10480, 20893, 33230, 1586, 9943, 16334, 68862, 9011, 14031, 6178, 21225, 1420, 32236, 2099, 2150, 26583, 2784, 8941, 9811, 27444, 50566 or 66428 modulator, thereby treating said subject having a tumorigenic disorder or angiogenic disorder.

10. The method of claim 9, wherein said tumorigenic or angiogenic disorder is selected from the group consisting of lung tumors, breast tumors, ovary tumors, colon tumors, and hemangioma.

11. The method of claim 9, wherein said 140, 1470, 1686, 2089, 2427, 3702, 5891, 6428, 7181, 7660, 25641, 69583, 49863, 8897, 1682, 17667, 9235, 3703, 14171, 10359, 1660, 1450, 18894, 2088, 32427, 2160, 9252, 9389, 1642, 85269, 10297, 1584, 9525, 14124, 4469, 8990, 2100, 9288, 64698, 10480, 20893, 33230, 1586, 9943, 16334, 68862, 9011, 14031, 6178, 21225, 1420, 32236, 2099, 2150, 26583, 2784, 8941, 9811, 27444, 50566 or 66428 modulator is administered in a pharmaceutically acceptable formulation.

12. The method of claim 9, wherein 140, 1470, 1686, 2089, 2427, 3702, 5891, 6428, 7181, 7660, 25641, 69583, 49863, 8897, 1682, 17667, 9235, 3703, 14171, 10359, 1660, 1450, 18894, 2088, 32427, 2160, 9252, 9389, 1642, 85269, 10297, 1584, 9525, 14124, 4469, 8990, 2100, 9288, 64698, 10480, 20893, 33230, 1586, 9943, 16334, 68862, 9011, 14031, 6178, 21225, 1420, 32236, 2099, 2150, 26583, 2784, 8941, 9811, 27444, 50566 or 66428 modulator is a small organic molecule, peptide, antibody or antisense nucleic acid molecule.

13. The method of claim 9, wherein the 140, 1470, 1686, 2089, 2427, 3702, 5891, 6428, 7181, 7660, 25641, 69583, 49863, 8897, 1682, 17667, 9235, 3703, 14171, 10359, 1660, 1450, 18894, 2088, 32427, 2160, 9252, 9389, 1642, 85269, 10297, 1584, 9525, 14124, 4469, 8990, 2100, 9288, 64698, 10480, 20893, 33230, 1586, 9943, 16334, 68862, 9011, 14031, 6178, 21225, 1420, 32236, 2099, 2150, 26583, 2784, 8941, 9811, 27444, 50566 or 66428 modulator is capable of modulating 140, 1470, 1686, 2089, 2427, 3702, 5891, 6428, 7181, 7660, 25641, 69583, 49863, 8897, 1682, 17667, 9235, 3703, 14171, 10359, 1660, 1450, 18894, 2088, 32427, 2160, 9252, 9389, 1642, 85269, 10297, 1584, 9525, 14124, 4469, 8990, 2100, 9288, 64698, 10480, 20893, 33230, 1586, 9943, 16334, 68862, 9011, 14031, 6178, 21225, 1420, 32236, 2099, 2150, 26583, 2784, 8941, 9811, 27444, 50566 or 66428 polypeptide activity.
